(19) United States
(12) Patent Application Publication
(10) Pub. No.: US 2002/0156263 A1
(43) Pub. Date: Oct. 24, 2002

(54) Genes expressed in breast cancer

(76) Inventor: Huei-Mei Chen, San Leandro, CA (US)

Correspondence Address: INCYTE GENOMICS, INC., 3160 Porter Drive, Palo Alto, CA, 94304, US

(21) Appl. No.: 09/974,298

(22) Filed: Oct. 4, 2001

Related U.S. Application Data
(60) Provisional application No. 60/238,331, filed on Oct. 5, 2000.

(51) Int. Cl. C12Q 1/68; C07H 21/04; C12P 19/34

(52) U.S. Cl. 536/23.2; 435/6; 435/91.2

(57) ABSTRACT

The present invention relates to a combination comprising a plurality of cDNAs which are differentially expressed in breast cancer and which may be used in their entirety or in part as to diagnose, to stage, to treat, or to monitor the treatment of a subject with a breast cancer.

### FIELD OF THE INVENTION

[0001] The present invention relates to a composition comprising a plurality of cDNAs which are differentially expressed in breast cancer and which may be used entirely or in part to diagnose, to stage, to treat, or to monitor the progression or treatment of breast cancer.

### BACKGROUND OF THE INVENTION

[0002] Array technology can provide a simple way to explore the expression of a single polymorphic gene or the expression profile of a large number of related or unrelated genes. When the expression of a single gene is examined, arrays are employed to detect the expression of a specific gene or its variants. When an expression profile is examined, arrays provide a platform for examining which genes are tissue specific, carrying out housekeeping functions, parts of a signaling cascade, or specifically related to a particular genetic predisposition, condition, disease, or disorder.

[0003] The potential application of gene expression profiling is particularly relevant to improving diagnosis, prognosis, and treatment of disease. For example, both the levels and sequences expressed in tissues from subjects with breast cancer may be compared with the levels and sequences expressed in normal tissue.

[0004] There are more than 180,000 new cases of breast cancer diagnosed each year, and the mortality rate for breast cancer approaches 10% of all deaths in females between the ages of 45-54 (K. Gish (1999) AWIS Magazine 28:7-10). However the survival rate based on early diagnosis of localized breast cancer is extremely high (97%), compared with the advanced stage of the disease in which the tumor has spread beyond the breast (22%). Current procedures for clinical breast examination are lacking in sensitivity and specificity, and efforts are underway to develop comprehensive gene expression profiles for breast cancer that may be used in conjunction with conventional screening methods to improve diagnosis and prognosis of this disease (Perou C M et al. (2000) Nature 406:747-752).

[0005] Breast cancer is a genetic disease commonly caused by mutations in cellular disease. Mutations in two genes, BRCA1 and BRCA2, are known to greatly predispose a woman to breast cancer and may be passed on from parents to children (Gish, supra). However, this type of hereditary breast cancer accounts for only about 5% to 9% of breast cancers, while the vast majority of breast cancer is due to noninherited mutations that occur in breast epithelial cells.

[0006] A good deal is already known about the expression of specific genes associated with breast cancer. For example, the relationship between expression of epidermal growth factor (EGF) and its receptor, EGFR, to human mammary carcinoma has been particularly well studied. (See Khazaie et al., supra, and references cited therein for a review of this area.) Overexpression of EGFR, particularly coupled with down-regulation of the estrogen receptor, is a marker of poor prognosis in breast cancer patients. In addition, EGFR expression in breast tumor metastases is frequently elevated relative to the primary tumor, suggesting that EGFR is involved in tumor progression and metastasis. This is supported by accumulating evidence that EGF has effects on cell functions related to metastatic potential, such as cell motility, chemotaxis, secretion and differentiation. Changes in expression of other members of the erbB receptor family, of which EGFR is one, have also been implicated in breast cancer. The abundance of erbB receptors, such as HER-2/neu, HER-3, and HER-4, and their ligands in breast cancer points to their functional importance in the pathogenesis of the disease, and may therefore provide targets for therapy of the disease (Bacus, S S et al. (1994) Am J Clin Pathol 102:S13-S24). Other known markers of breast cancer include a human secreted frizzled protein mRNA that is downregulated in breast tumors; the matrix G1 a protein which is overexpressed is human breast carcinoma cells; Drg1 or RTP, a gene whose expression is diminished in colon, breast, and prostate tumors; maspin, a tumor suppressor gene downregulated in invasive breast carcinomas; and CaN19, a member of the S100 protein family, all of which are down regulated in mammary carcinoma cells relative to normal mammary epithelial cells (Zhou Z et al. (1998) Int J Cancer 78:95-99; Chen, L et al. (1990) Oncogene 5:1391-1395; Ulrix W et al (1999) FEBS Lett 455:23-26; Sager, R et al. (1996) Curr Top Microbiol Immunol 213:51-64; and Lee, S W et al. (1992) Proc Natl Acad Sci USA 89:2504-2508).

[0007] Cell lines derived from human mammary epithelial cells at various stages of breast cancer provide a useful model to study the process of malignant transformation and tumor progression as it has been shown that these cell lines retain many of the properties of their parental tumors for lengthy culture periods (Wistuba II et.al. (1998) Clin Cancer Res 4:2931-2938). Such a model is particularly useful for comparing phenotypic and molecular characteristics of human mammary epithelial cells at various stages of malignant transformation.

[0008] The present invention provides for a combination comprising a plurality of cDNAs for use in detecting changes in expression of genes encoding proteins that are associated with breast cancer. Such a composition can be employed for the diagnosis, prognosis or treatment of breast cancer correlated with differential gene expression. The present invention satisfies a need in the art by providing a set of differentially expressed genes which may be used entirely or in part to diagnose, to stage, to treat, or to monitor the progression or treatment of a subject with breast cancer.

### SUMMARY

[0009] The present invention provides a combination comprising a plurality of cDNAs and their complements which are differentially expressed in breast cancer and which are selected from SEQ ID NOs:1, 3, 5, 7, 8, 10-14, 16, 18, 19, 21-40, 42-48, 50, 51, 53-55, 57-65, 67-70, 72-74, 76-80, 82-85, 87, 88, 90, 92, 94, 96-109, 111, 113, 115, 116, 117, 119, 121, 123-126, 128, 130, 131, 133, 134, 135, 137, 138, 140, 142-144, 146, 148, 150, 152, 153, 155-158, 160, 161, 163-183, 185, 187-192, and 194 as presented in the Sequence Listing. In one aspect, the combination is useful to diagnose a breast cancer. In another aspect, the combination is immobilized on a substrate. The invention also provides a combination comprising a subset of these cDNAs and their complements which are differentially expressed in metastatic breast cancer and which are selected from SEQ ID NOs:109, 111, 113, 115, 116, 117, 119, 121, 123-126, 128, 130, 131, 133, 134, 135, 137, 138, 140, 142-144, 146, 148, 150, 152, 153, 155-158, 160, 161, 163-183, 185, 187-192, and 194 as presented in the Sequence Listing. In one aspect, the combination is useful to diagnose and monitor treatment of an advanced stage of breast cancer. In another aspect, the combination is immobilized on a substrate.

[0010] The invention provides a high throughput method to detect expression of a nucleic acid which is complementary at least one of the cDNAs of the combination in a sample. The method comprises hybridizing a substrate containing the combination with a sample containing nucleic acids under conditions to form at least one hybridization complex and detecting hybridization complex formation, wherein complex formation indicates expression of at least one complementary nucleic acid in the sample. In one aspect, the sample is from a subject with breast cancer and differential expression determines the presence or the stage of that disorder.

[0011] The invention also provides a high throughput method of screening a library or a plurality of molecules or compounds to identify a ligand. The method comprises combining the substrate comprising the combination with a library or plurality of molecules or compounds under conditions to allow specific binding and detecting specific binding, thereby identifying a ligand. The library or plurality of molecules or compounds are selected from DNA molecules, RNA molecules, peptide nucleic acid molecules, mimetics, peptides, transcription factors, repressors, and other regulatory proteins. The invention additionally provides a method for purifying a ligand, the method comprising combining a cDNA of the invention with a sample under conditions which allow specific binding, recovering the bound cDNA, and separating the cDNA from the ligand, thereby obtaining purified ligand.

[0012] The invention further provides an isolated cDNA selected from SEQ ID NOs:21, 50, 79, 100, 105, 106, 107, 109, 126, 178, 181, 190, and 191 as presented in the Sequence Listing. The invention also provides a vector comprising the cDNA, a host cell comprising the vector, and a method for producing a protein comprising culturing the host cell under conditions for the expression of a protein and recovering the protein from the host cell culture.

[0013] The present invention provides a purified protein encoded and produced by a cDNA of the invention. The invention also provides a high-throughput method for using a protein to screen a library or a plurality of molecules or compounds to identify a ligand. The method comprises combining the protein or a portion thereof with the library or plurality of molecules or compounds under conditions to allow specific binding and detecting specific binding, thereby identifying a ligand which specifically binds the protein. A library or plurality of molecules or compounds are selected from DNA molecules, RNA molecules, peptide nucleic acid molecules, mimetics, peptides, proteins, agonists, antagonists, antibodies or their fragments, immunoglobulins, inhibitors, drug compounds, and pharmaceutical agents. The invention further provides for using a protein to purify a ligand. The method comprises combining the protein or a portion thereof with a sample under conditions to allow specific binding, recovering the bound protein, and separating the protein from the ligand, thereby obtaining purified ligand. The invention still further provides a composition comprising the protein and a pharmaceutical carrier.

[0014] The invention also provides methods for using a protein to prepare and purify polyclonal and monoclonal antibodies which specifically bind the protein. The method for preparing a polyclonal antibody comprises immunizing a animal with protein under conditions to elicit an antibody response, isolating animal antibodies, attaching the protein to a substrate, contacting the substrate with isolated antibodies under conditions to allow specific binding to the protein, dissociating the antibodies from the protein, thereby obtaining purified polyclonal antibodies. The method for preparing and purifying monoclonal antibodies comprises immunizing a animal with a protein under conditions to elicit an antibody response, isolating antibody producing cells from the animal, fusing the antibody producing cells with immortalized cells in culture to form monoclonal antibody producing hybridoma cells, culturing the hybridoma cells, and isolating from culture monoclonal antibodies which specifically bind the protein.

[0015] The invention provides a purified antibody that specifically binds a protein expressed in breast cancer. The invention also provides a method for using an antibody to detect expression of a protein in a sample comprising combining the antibody with a sample under conditions which allow the formation of antibody:protein complexes and detecting complex formation, wherein complex formation indicates expression of the protein in the sample.

### DESCRIPTION OF THE SEQUENCE LISTING AND TABLES

[0016] A portion of the disclosure of this patent document contains material that is subject to copyright protection. The copyright owner has no objection to the facsimile reproduction by anyone of the patent document or the patent disclosure, as it appears in the Patent and Trademark Office patent file or records, but otherwise reserves all copyright rights whatsoever.

[0017] The Sequence Listing is a compilation of cDNAs and encoded proteins obtained by sequencing and extension of clone inserts. Each sequence is identified by a sequence identification number (SEQ ID NO) and by the Incyte identification number (Incyte ID No) from which it was obtained.

[0018] Table 1 lists the differential expression values of clones representing the cDNAs of the present invention that are differentially expressed in both tumorigenic, nonmetastatic (MCF7, BT20, T47D) and metastatic (MDA-mb-231) breast carcinoma cells. Columns 1 and 2 show the Incyte Clone ID and differential expression values, respectively. Columns 3 and 4 show the tumor cell lines in which differential expression was measured relative to the non-tumorigenic breast cell lines, MCF10A (column 3), and HMEC (column 4).

[0019] Table 2 lists similar data to that found in Table 1 for clones representing cDNAs differentially expressed in metastatic breast adenocarcinoma cells only (MDA-mb-231). Column 1 lists the Incyte Clone ID, and columns 2 and 3 list the differential expression value observed in the metastatic cell line, MDA-mb-231, relative to HMEC cells (column 2) and MCF10A cells (column 3).

[0020] Table 3 links the differentially expressed clones on a microarray with Incyte cDNA templates. Columns 1 and 2 show the SEQ ID NO and TEMPLATE ID, respectively. Column 3 shows the CLONE ID and columns 4 and 5 show the first residue (START) and last residue (STOP) encompassed by the clone on the template.

[0021] Table 4 shows Incyte nucleotide templates presented in the Sequence Listing and the corresponding protein templates encoded by these cDNAs, also presented in the Sequence Listing. Columns 1 and 2 show the SEQ ID NO and the Nucleotide Template ID, respectively, and columns 3 and 4 show the corresponding SEQ ID NO and Protein Template ID, respectively.

[0022] Table 5 shows the annotation of both nucleotide and protein Template IDs of the invention to sequences in GenBank. Columns 1 and 2 show the SEQ ID NO and TEMPLATE ID, respectively. Columns 3, 4, and 5 show the GenBank hit (GI Number), probability score (E-value), and functional annotation, respectively, as determined by BLAST analysis (version 1.4 using default parameters; Altschul (1993) J Mol Evol 36: 290-300; Altschul et al. (1990) J Mol Biol 215:403-410) of the cDNA against GenBank (release 116; National Center for Biotechnology Information (NCBI), Bethesda Md.).

[0023] Table 6 shows Pfam annotations of the cDNAs and proteins of the present invention. Columns 1 and 2 show the SEQ ID NO and TEMPLATE ID, respectively. Columns 3 and 4 show the first residue (START), last residue (STOP), respectively, for the segment of the cDNA or protein identified by Pfam analysis. Column 5 shows the reading frame for cDNA sequences. Columns 6 and 7 show the Pfam hit and Pfam description, respectively, corresponding to the polypeptide domain encoded by the cDNA segment or found in the protein sequence, and column 8 shows the E-value for the annotation.

[0024] Table 7 shows signal peptide and transmembrane regions predicted within the cDNAs of the present invention and in the proteins of the invention. Columns 1 and 2 show the SEQ ID NO and TEMPLATE ID, respectively. Columns 3 and 4 show the first residue (START), last residue (STOP), respectively, for the segment of the cDNA or the protein identified as a signal peptide or transmembrane region, and column 5 shows the reading frame for cDNA sequences. Column 6 identifies the polypeptide region as either a signal peptide (SP) or transmembrane (TM) domain.

### DESCRIPTION OF THE INVENTION

[0025] Definitions

[0026] “Array” refers to an ordered arrangement of at least two cDNAs on a substrate. At least one of the cDNAs represents a control or standard sequence, and the other, a cDNA of diagnostic interest. The arrangement of from about two to about 40,000 cDNAs on the substrate assures that the size and signal intensity of each labeled hybridization complex formed between a cDNA and a sample nucleic acid is individually distinguishable.

[0027] The “complement” of a nucleic acid molecule of the Sequence Listing refers to a nucleotide sequence which is completely complementary over the full length of the sequence and which will hybridize to the nucleic acid molecule under conditions of high stringency.

[0028] A “combination” comprises at least two and up to 194 sequences selected from the group consisting of SEQ ID NOs:1-194 as presented in the Sequence Listing.

[0029] “cDNA” refers to a chain of nucleotides, an isolated polynucleotide, nucleic acid molecule, or any fragment or complement thereof. It may have originated recombinantly or synthetically, be double-stranded or single-stranded, coding and/or noncoding, an exon with or without an intron from a genomic DNA molecule, and purified or combined with carbohydrate, lipids, protein or inorganic elements or substances. Preferably, the cDNA is from about 400 to about 10,000 nucleotides.

[0030] The phrase “cDNA encoding a protein” refers to a nucleic acid sequence that closely aligns with sequences which encode conserved regions, motifs or domains that were identified by employing analyses well known in the art. These analyses include BLAST (Basic Local Alignment Search Tool; Altschul (1993) J Mol Evol36: 290-300; Altschul et al. (1990) J Mol Biol 215:403-410) which provides identity within the conserved region. Brenner et al. (1998; Proc Natl Acad Sci 95:6073-6078) who analyzed BLAST for its ability to identify structural homologs by sequence identity found 30% identity is a reliable threshold for sequence alignments of at least 150 residues and 40% is a reasonable threshold for alignments of at least 70 residues (Brenner et al., page 6076, column 2).

[0031] “Derivative” refers to a cDNA or a protein that has been subjected to a chemical modification. Derivatization of a cDNA can involve substitution of a nontraditional base such as queosine or of an analog such as hypoxanthine. These substitutions are well known in the art. Derivatization of a protein involves the replacement of a hydrogen by an acetyl, acyl, alkyl, amino, formyl, or morpholino group. Derivative molecules retain the biological activities of the naturally occurring molecules but may confer advantages such as longer lifespan or enhanced activity.

[0032] “Differential expression” refers to an increased or upregulated or a decreased or downregulated expression as detected by absence, presence, or at least two-fold change in the amount of transcribed messenger RNA or translated protein in a sample.

[0033] “Fragment” refers to a chain of consecutive nucleotides from about 200 to about 700 base pairs in length. Fragments may be used in PCR or hybridization technologies to identify related nucleic acid molecules and in binding assays to screen for a ligand. Nucleic acids and their ligands identified in this manner are useful as therapeutics to regulate replication, transcription or translation.

[0034] A “hybridization complex” is formed between a cDNA and a nucleic acid of a sample when the purines of one molecule hydrogen bond with the pyrimidines of the complementary molecule, e.g., 5′-A-G-T-C-3′base pairs with 3′-T-C-A-G-5′. The degree of complementarity and the use of nucleotide analogs affect the efficiency and stringency of hybridization reactions.

[0035] “Identity” as applied to sequences, refers to the quantification (usually percentage) of nucleotide or residue matches between at least two sequences aligned using a standardized algorithm such as Smith-Waterman alignment (Smith and Waterman (1981) J Mol Biol 147:195-197), CLUSTALW (Thompson et al. (1994) Nucleic Acids Res 22:4673-4680), or BLAST2 (Altschul et al. (1997) supra). BLAST2 may be used in a standardized and reproducible way to insert gaps in one of the sequences in order to optimize alignment and to achieve a more meaningful comparison between them. “Similarity” as applied to proteins uses the same algorithms but takes into account conservative substitutions of nucleotides or residues.

[0036] “Ligand” refers to any agent, molecule, or compound which will bind specifically to a complementary site on a cDNA molecule or polynucleotide, or to an epitope or a protein. Such ligands stabilize or modulate the activity of polynucleotides or proteins and may be composed of inorganic or organic substances including nucleic acids, proteins, carbohydrates, fats, and lipids.

[0037] “Oligonucleotide” refers a single stranded molecule from about 18 to about 60 nucleotides in length which may be used in hybridization or amplification technologies or in regulation of replication, transcription or translation. Substantially equivalent terms are amplimer, primer, and oligomer.

[0038] “Portion” refers to any part of a protein used for any purpose which retains at least one biological or antigenic characteristic of a native protein; but especially, to an epitope for the screening of ligands or for the production of antibodies.

[0039] “Post-translational modification” of a protein can involve lipidation, glycosylation, phosphorylation, acetylation, racemization, proteolytic cleavage, and the like. These processes may occur synthetically or biochemically. Biochemical modifications will vary by cellular location, cell type, pH, enzymatic milieu, and the like.

[0040] “Probe” refers to a cDNA that hybridizes to at least one nucleic acid molecule in a sample. Where targets are single stranded, probes are complementary single strands. Probes can be labeled with reporter molecules for use in hybridization reactions including Southern, northern, in situ, dot blot, array, and like technologies or in screening assays.

[0041] “Protein” refers to a polypeptide or any portion thereof. An “oligopeptide” is an amino acid sequence from about five residues to about 15 residues that is used as part of a fusion protein to produce an antibody.

[0042] “Purified” refers to any molecule or compound that is separated from its natural environment and is preferably 60% free, and more preferably 90% free from other components with which it is naturally associated.

[0043] “Sample” is used in its broadest sense as containing nucleic acids, proteins, antibodies, and the like. A sample may comprise a bodily fluid; the soluble fraction of a cell preparation, or an aliquot of media in which cells were grown; a chromosome, an organelle, or membrane isolated or extracted from a cell; genomic DNA, RNA, or cDNA in solution or bound to a substrate; a cell; a tissue or tissue biopsy; a tissue print; a fingerprint, buccal cells, skin, or hair; and the like.

[0044] “Specific binding” refers to a special and precise interaction between two molecules which is dependent upon their structure, particularly their molecular side groups. For example, the intercalation of a regulatory protein into the major groove of a DNA molecule, the hydrogen bonding along the backbone between two single stranded nucleic acids, or the binding between an epitope of a protein and an agonist, antagonist, or antibody.

[0045] “Substrate” refers to any rigid or semi-rigid support to which cDNAs or proteins are bound and includes membranes, filters, chips, slides, wafers, fibers, magnetic or nonmagnetic beads, gels, capillaries or other tubing, plates, polymers, and microparticles with a variety of surface forms including wells, trenches, pins, channels and pores.

[0046] “Variant” refers to molecules that are recognized variations of a cDNA or a protein encoded by the cDNA. Splice variants maybe determined by BLAST score, wherein the score is at least 100, and most preferably at least 400. Allelic variants have a high percent identity to the cDNAs and may differ by about three bases per hundred bases. “Single nucleotide polymorphism” (SNP) refers to a change in a single base as a result of a substitution, insertion or deletion. The change may be conservative (purine for purine) or non-conservative (purine to pyrimidine) and may or may not result in a change in an encoded amino acid.

[0047] The Invention

[0048] The present invention provides for a combination comprising a plurality of cDNAs or their complements, SEQ ID NOs:1, 3, 5, 7, 8, 10-14, 16, 18, 19, 21-40, 42-48, 50, 51, 53-55, 57-65, 67-70, 72-74, 76-80, 82-85, 87, 88, 90, 92, 94, 96-108, 109, 111, 113, 115, 116, 117, 119, 121, 123-126, 128, 130, 131, 133, 134, 135, 137, 138, 140, 142-144, 146, 148, 150, 152, 153, 155-158, 160, 161, 163-183, 185, 187-192, and 194 which may be used on a substrate to diagnose, to stage, to treat or to monitor the progression or treatment of breast cancer. These cDNAs represent known and novel genes differentially expressed in breast adenocarcinoma cells. SEQ ID NOs:21, 50, 79, 100, 105, 106, 107, 178, 181, 190, and 191 represent novel cDNAs associated with breast cancer. Since the novel cDNAs were identified solely by their differential expression, it is not essential to know a priori the name, structure, or function of the gene or it's encoded protein. The usefulness of the novel cDNAs exists in their immediate value as diagnostics for breast cancer.

[0049] Table 1 shows cDNA clones on an array having at least a 3-fold increase (upregulated) or decrease (downregulated, indicated by a minus sign) in either tumorigenic, non-metastatic breast adenocarcinoma cells (MCF7, T47D, or BT20), or in metastatic adenocarcinoma cells (MDA-mb-231) relative to non-tumorigenic breast cells (MCF10A and HMEC). Columns 1 and 2 show the Clone ID and differential expression value, respectively. The value given in column 2 is representative of the differential expression observed in all of the tumor cell lines indicated in columns 3 and 4. Columns 3 and 4 show the tumor cell lines in which differential expression was observed relative to non-tumorigenic breast cell lines MCF10A (column 3) and HMEC (column 4), respectively. The numerical designations of the cell lines given in columns 3 and 4 are as follows: 1=MCF7; 2=T47D; 3=BT20; 4=MDA-mb-231. These genes are useful in the diagnosis of, or monitoring the treatment of breast cancer, particularly at an early stage, e.g., prior to metastasis.

[0050] Table 2 shows cDNA clones on an array having at least a 3-fold increase or decrease in only the metastatic breast adenocarcinoma cell line, MDA-mb-231, relative to non-tumorigenic cells. These cDNA clones were not observed to be differentially regulated in either the tumorigenic, non-metastatic cell lines MCF7, T47D, and BT20, or the non-tumorigenic cells, MCF10A and HMEC. These genes are particularly useful for the diagnosis or monitoring the treatment of an advanced stage of breast cancer in which metastasis to other organs or tissues may have occurred, or has the potential to occur.

[0051] Tables 3 and 4 further link the differentially expressed cDNA clones to full-length genes and to proteins in the Incyte database, and Table 5 provides the annotation of these sequences to known proteins in GenBank. Tables 6 and 7 provide further identification of encoded protein sequences by Pfam and the presence of signal peptide or transmembrane regions.

[0052] Of particular interest in Table 5 are several genes annotated to known breast tumor markers. SEQ ID NO:11 is identified as a human S100A2 gene; SEQ ID NO:24 is identified as a human maspin mRNA; SEQ ID NO:28 is identified as a human secreted frizzled related protein mRNA; SEQ ID NO:48 is identified as a human matrix G1 a protein mRNA; and SEQ ID NO:80 is identified as a human mRNA for Drg1 protein. As shown in Tables 1-3, these genes are derived from Incyte clones that are differentially expressed in tumor cells in agreement with the previously observed differential expression patterns of the known genes in human breast tumors or human breast tumor cell lines. It is also noteworthy that the majority of differentially expressed genes in the metastatic cell line MDA-mb-231, shown in Table 2, are upregulated (58 of 62 or approximately 94%). In this particular cell model, suppressive mechanisms (downregulation) are operative in the tumorigenic conversion of the cell type, while inductive mechanisms (upregulation) are involved in the progression of the cell type to metastasis.

[0053] The cDNAs of the invention define differential expression patterns against which to compare the expression pattern of biopsied breast tissue to determine the presence of breast cancer (SEQ ID NOs:1, 3, 5, 7, 8, 10-14, 16, 18, 19, 21-40, 42-48, 50, 51, 53-55, 57-65, 67-70, 72-74, 76-80, 82-85, 87, 88, 90, 92, 94, 96-109, 111, 113, 115, 116, 117, 119, 121, 123-126, 128, 130, 131, 133, 134, 135, 137, 138, 140, 142-144, 146, 148, 150, 152, 153, 155-158, 160, 161, 163-183, 185, 187-192, and 194), or more particularly, the presence of an advanced stage of the disease (SEQ ID NOs:109, 111, 113, 115, 116, 117, 119, 121, 123-126, 128, 130, 131, 133, 134, 135, 137, 138, 140, 142-144, 146, 148, 150, 152, 153, 155-158, 160, 161, 163-183, 185, 187-192, and 194). Experimentally, differential expression of the cDNAs can be evaluated by methods including, but not limited to, differential display by spatial immobilization or by gel electrophoresis, genome mismatch scanning, representational discriminant analysis, clustering, transcript imaging and array technologies. These methods may be used alone or in combination.

[0054] In one embodiment, an additional set of cDNAs, such as cDNAs encoding signaling molecules, are arranged on the substrate with the combination. Such combinations may be useful in the elucidation of pathways which are affected in a particular disorder or to identify new, coexpressed, candidate, therapeutic molecules.

[0055] In another embodiment, the combination can be used for large scale genetic or gene expression analysis of a large number of novel, nucleic acid molecules. These samples are prepared by methods well known in the art and are from mammalian cells or tissues which are in a certain stage of development; have been treated with a known molecule or compound, such as a cytokine, growth factor, a drug, and the like; or have been extracted or biopsied from a mammal with a known or unknown condition, disorder, or disease before or after treatment. The sample nucleic acid molecules are hybridized to the combination for the purpose of defining a novel gene profile associated with that developmental stage, treatment, or disorder.

[0056] cDNAs and Their Uses

[0057] cDNAs can be prepared by a variety of synthetic or enzymatic methods well known in the art. cDNAs can be synthesized, in whole or in part, using chemical methods well known in the art (Caruthers et al. (1980) Nucleic Acids Symp Ser (7)215-233). Alternatively, cDNAs can be produced enzymatically or recombinantly, by in vitro or in vivo transcription.

[0058] Nucleotide analogs can be incorporated into cDNAs by methods well known in the art. The only requirement is that the incorporated analog must base pair with native purines or pyrimidines. For example, 2, 6-diaminopurine can substitute for adenine and form stronger bonds with thymidine than those between adenine and thymidine. A weaker pair is formed when hypoxanthine is substituted for guanine and base pairs with cytosine. Additionally, cDNAs can include nucleotides that have been derivatized chemically or enzymatically.

[0059] cDNAs can be synthesized on a substrate. Synthesis on the surface of a substrate may be accomplished using a chemical coupling procedure and a piezoelectric printing apparatus as described by Baldeschweiler et al. (PCT publication WO95/251116). Alternatively, the cDNAs can be synthesized on a substrate surface using a self-addressable electronic device that controls when reagents are added as described by Heller et al. (U.S. Pat. No. 5,605,662). cDNAs can be synthesized directly on a substrate by sequentially dispensing reagents for their synthesis on the substrate surface or by dispensing preformed DNA fragments to the substrate surface. Typical dispensers include a micropipette delivering solution to the substrate with a robotic system to control the position of the micropipette with respect to the substrate. There can be a multiplicity of dispensers so that reagents can be delivered to the reaction regions efficiently.

[0060] cDNAs can be immobilized on a substrate by covalent means such as by chemical bonding procedures or UV irradiation. In one method, a cDNA is bound to a glass surface which has been modified to contain epoxide or aldehyde groups. In another method, a cDNA is placed on a polylysine coated surface and UV cross-linked to it as described by Shalon et al. (WO95/35505). In yet another method, a cDNA is actively transported from a solution to a given position on a substrate by electrical means (Heller, supra). cDNAs do not have to be directly bound to the substrate, but rather can be bound to the substrate through a linker group. The linker groups are typically about 6 to 50 atoms long to provide exposure of the attached cDNA. Preferred linker groups include ethylene glycol oligomers, diamines, diacids and the like. Reactive groups on the substrate surface react with a terminal group of the linker to bind the linker to the substrate. The other terminus of the linker is then bound to the cDNA. Alternatively, polynucleotides, plasmids or cells can be arranged on a filter. In the latter case, cells are lysed, proteins and cellular components degraded, and the DNA is coupled to the filter by UV cross-linking.

[0061] The cDNAs may be used for a variety of purposes. For example, the combination of the invention may be used on an array. The array, in turn, can be used in high-throughput methods for detecting a related polynucleotide in a sample, screening a plurality of molecules or compounds to identify a ligand, diagnosing a breast cancer, or inhibiting or inactivating a therapeutically relevant gene related to the cDNA.

[0062] When the cDNAs of the invention are employed on an array, the cDNAs are arranged in an ordered fashion so that each cDNA is present at a specified location. Because the cDNAs are at specified locations on the substrate, the hybridization patterns and intensities, which together create a unique expression profile, can be interpreted in terms of expression levels of particular genes and can be correlated with a particular metabolic process, condition, disorder, disease, stage of disease, or treatment.

[0063] Hybridization

[0064] The cDNAs or fragments or complements thereof may be used in various hybridization technologies. The cDNAs may be labeled using a variety of reporter molecules by either PCR, recombinant, or enzymatic techniques. For example, a commercially available vector containing the cDNA is transcribed in the presence of an appropriate polymerase, such as T7 or SP6 polymerase, and at least one labeled nucleotide. Commercial kits are available for labeling and cleanup of such cDNAs. Radioactive (Amersham Pharmacia Biotech (APB), Piscataway N.J.), fluorescent (Operon Technologies, Alameda Calif.), and chemiluminescent labeling (Promega, Madison Wis.) are well known in the art.

[0065] A cDNA may represent the complete coding region of an mRNA or be designed or derived from unique regions of the mRNA or genomic molecule, an intron, a 3′ untranslated region, or from a conserved motif. The cDNA is at least 18 contiguous nucleotides in length and is usually single stranded. Such a cDNA may be used under hybridization conditions that allow binding only to an identical sequence, a naturally occurring molecule encoding the same protein, or an allelic variant. Discovery of related human and mammalian sequences may also be accomplished using a pool of degenerate cDNAs and appropriate hybridization conditions. Generally. a cDNA for use in Southern or northern hybridizations may be from about 400 to about 6000 nucleotides long. Such cDNAs have high binding specificity in solution-based or substrate-based hybridizations. An oligonucleotide, a fragment of the cDNA, may be used to detect a polynucleotide in a sample using PCR.

[0066] The stringency of hybridization is determined by G+C content of the cDNA, salt concentration, and temperature. In particular, stringency is increased by reducing the concentration of salt or raising the hybridization temperature. In solutions used for some membrane based hybridizations, addition of an organic solvent such as formamide allows the reaction to occur at a lower temperature. Hybridization may be performed with buffers, such as 5× saline sodium citrate (SSC) with 1% sodium dodecyl sulfate (SDS) at 60° C., that permit the formation of a hybridization complex between nucleic acid sequences that contain some mismatches. Subsequent washes are performed with buffers such as 0.2×SSC with 0.1% SDS at either 45° C. (medium stringency), or 65°-68° C. (high stringency). At high stringency, hybridization complexes will remain stable only where the nucleic acid molecules are completely complementary. In some membrane-based hybridizations, preferably 35% or most preferably 50%, formamide may be added to the hybridization solution to reduce the temperature at which hybridization is performed. Background signals may be reduced by the use of detergents such as Sarkosyl or Triton X-100 (Sigma Aldrich, St. Louis Mo.) and a blocking agent such as denatured salmon sperm DNA. Selection of components and conditions for hybridization are well known to those skilled in the art and are reviewed in Ausubel et al. (1997, Short Protocols in Molecular Biology, John Wiley & Sons, New York N.Y., Units 2.8-2.11, 3.18-3.19 and 4.6-4.9).

[0067] Dot-blot, slot-blot, low density and high density arrays are prepared and analyzed using methods known in the art. cDNAs from about 18 consecutive nucleotides to about 5000 consecutive nucleotides in length are contemplated by the invention and used in array technologies. The preferred number of cDNAs on an array is at least about 100,000, a more preferred number is at least about 40,000, an even more preferred number is at least about 10,000, and a most preferred number is at least about 600 to about 800. The array may be used to monitor the expression level of large numbers of genes simultaneously and to identify genetic variants, mutations, and SNPs. Such information may be used to determine gene function; to understand the genetic basis of a disorder; to diagnose a disorder; and to develop and monitor the activities of therapeutic agents being used to control or cure a disorder. (See, e.g., U.S. Pat. No. 5,474,796; WO95/11995; WO95/35505; U.S. Pat. No. 5,605,662; and U.S. Pat. No. 5,958,342.)

[0068] Screening and Purification Assays

[0069] A cDNA may be used to screen a library or a plurality of molecules or compounds for a ligand which specifically binds the cDNA. Ligands may be DNA molecules, RNA molecules, peptide nucleic acid molecules, peptides, proteins such as transcription factors, promoters, enhancers, repressors, and other proteins that regulate replication, transcription, or translation of the polynucleotide in the biological system. The assay involves combining the cDNA or a fragment thereof with the molecules or compounds under conditions that allow specific binding and detecting the bound cDNA to identify at least one ligand that specifically binds the cDNA.

[0070] In one embodiment, the cDNA may be incubated with a library of isolated and purified molecules or compounds and binding activity determined by methods such as a gel-retardation assay (U.S. Pat. No. 6,010,849) or a reticulocyte lysate transcriptional assay. In another embodiment, the cDNA may be incubated with nuclear extracts from biopsied and/or cultured cells and tissues. Specific binding between the cDNA and a molecule or compound in the nuclear extract is initially determined by gel shift assay. Protein binding may be confirmed by raising antibodies against the protein and adding the antibodies to the gel-retardation assay where specific binding will cause a supershift in the assay.

[0071] In another embodiment, the cDNA may be used to purify a molecule or compound using affinity chromatography methods well known in the art. In one embodiment, the cDNA is chemically reacted with cyanogen bromide groups on a polymeric resin or gel. Then a sample is passed over and reacts with or binds to the cDNA. The molecule or compound which is bound to the cDNA may be released from the cDNA by increasing the salt concentration of the flow-through medium and collected.

[0072] The cDNA may be used to purify a ligand from a sample. A method for using a cDNA to purify a ligand would involve combining the cDNA or a fragment thereof with a sample under conditions to allow specific binding, recovering the bound cDNA, and using an appropriate agent to separate the cDNA from the purified ligand.

[0073] Protein Production and Uses

[0074] The full length cDNAs or fragment thereof may be used to produce purified proteins using recombinant DNA technologies described herein and taught in Ausubel et al. (supra; Units 16.1-16.62). One of the advantages of producing proteins by these procedures is the ability to obtain highly-enriched sources of the proteins thereby simplifying purification procedures.

[0075] The proteins may contain amino acid substitutions, deletions or insertions made on the basis of similarity in polarity, charge, solubility, hydrophobicity, hydrophilicity, and/or the amphipathic nature of the residues involved. Such substitutions may be conservative in nature when the substituted residue has structural or chemical properties similar to the original residue (e.g., replacement of leucine with isoleucine or valine) or they may be nonconservative when the replacement residue is radically different (e.g., a glycine replaced by a tryptophan). Computer programs included in LASERGENE software (DNASTAR, Madison Wis.), MACVECTOR software (Genetics Computer Group, Madison Wis.) and RasMol software (Roger Sayle, University of Massachusetts, Amherst Mass.) may be used to help determine which and how many amino acid residues in a particular portion of the protein may be substituted, inserted, or deleted without abolishing biological or immunological activity.

[0076] Expression of Encoded Proteins

[0077] Expression of a particular cDNA may be accomplished by cloning the cDNA into a vector and transforming this vector into a host cell. The cloning vector used for the construction of cDNA libraries in the LIFESEQ databases may also be used for expression. Such vectors usually contain a promoter and a polylinker useful for cloning, priming, and transcription. An exemplary vector may also contain the promoter for β-galactosidase, an amino-terminal methionine and the subsequent seven amino acid residues of β-galactosidase. The vector may be transformed into competent E. coli cells. Induction of the isolated bacterial strain with isopropylthiogalactoside (IPTG) using standard methods will produce a fusion protein that contains an N terminal methionine, the first seven residues of β-galactosidase, about 15 residues of linker, and the protein encoded by the cDNA.

[0078] The cDNA may be shuttled into other vectors known to be useful for expression of protein in specific hosts. Oligonucleotides containing cloning sites and fragments of DNA sufficient to hybridize to stretches at both ends of the cDNA may be chemically synthesized by standard methods. These primers may then be used to amplify the desired fragments by PCR. The fragments may be digested with appropriate restriction enzymes under standard conditions and isolated using gel electrophoresis. Alternatively, similar fragments are produced by digestion of the cDNA with appropriate restriction enzymes and filled in with chemically synthesized oligonucleotides. Fragments of the coding sequence from more than one gene may be ligated together and expressed.

[0079] Signal sequences that dictate secretion of soluble proteins are particularly desirable as component parts of a recombinant sequence. For example, a chimeric protein may be expressed that includes one or more additional purification-facilitating domains. Such domains include, but are not limited to, metal-chelating domains that allow purification on immobilized metals, protein A domains that allow purification on immobilized immunoglobulin, and the domain utilized in the FLAGS extension/affinity purification system (Immunex, Seattle Wash.). The inclusion of a cleavable-linker sequence such as ENTEROKINASEMAX (Invitrogen, San Diego Calif.) between the protein and the purification domain may also be used to recover the protein.

[0080] Suitable host cells may include, but are not limited to, mammalian cells such as Chinese Hamster Ovary (CHO) and human 293 cells, insect cells such as Sf9 cells, plant cells such as Nicotiana tabacum, yeast cells such as Saccharomyces cerevisiae, and bacteria such as E. coli. For each of these cell systems, a useful vector may also include an origin of replication and one or two selectable markers to allow selection in bacteria as well as in a transformed eukaryotic host. Vectors for use in eukaryotic host cells may require the addition of 3′ poly(A) tail if the cDNA lacks poly(A).

[0081] Additionally, the vector may contain promoters or enhancers that increase gene expression. Many promoters are known and used in the art. Most promoters are host specific and exemplary promoters include SV40 promoters for CHO cells; T7 promoters for bacterial hosts; viral promoters and enhancers for plant cells; and PGH promoters for yeast. Adenoviral vectors with the rous sarcoma virus enhancer or retroviral vectors with long terminal repeat promoters may be used to drive protein expression in mammalian cell lines. Once homogeneous cultures of recombinant cells are obtained, large quantities of secreted soluble protein may be recovered from the conditioned medium and analyzed using chromatographic methods well known in the art. An alternative method for the production of large amounts of secreted protein involves the transformation of mammalian embryos and the recovery of the recombinant protein from milk produced by transgenic cows, goats, sheep, and the like.

[0082] In addition to recombinant production, proteins or portions thereof may be produced manually, using solid-phase techniques (Stewart et al. (1969) Solid-Phase Peptide Synthesis, W H Freeman, San Francisco Calif.; Merrifield (1963) J Am Chem Soc 5:2149-2154), or using machines such as the ABI 431A peptide synthesizer (Applied Biosystems, Foster City Calif.). Proteins produced by any of the above methods may be used as pharmaceutical compositions to treat disorders associated with null or inadequate expression of the genomic sequence.

[0083] Screening and Purification Assays

[0084] A protein or a portion thereof encoded by the cDNA may be used to screen a library or a plurality of molecules or compounds for a ligand with specific binding affinity or to purify a molecule or compound from a sample. The protein or portion thereof employed in such screening may be free in solution, affixed to an abiotic or biotic substrate, or located intracellularly. For example, viable or fixed prokaryotic host cells that are stably transformed with recombinant nucleic acids that have expressed and positioned a protein on their cell surface can be used in screening assays. The cells are screened against a library or a plurality of ligands and the specificity of binding or formation of complexes between the expressed protein and the ligand may be measured. The ligands may be DNA, RNA, or PNA molecules, agonists, antagonists, antibodies, immunoglobulins, inhibitors, peptides, pharmaceutical agents, proteins, drugs, or any other test molecule or compound that specifically binds the protein. An exemplary assay involves combining the mammalian protein or a portion thereof with the molecules or compounds under conditions that allow specific binding and detecting the bound protein to identify at least one ligand that specifically binds the protein.

[0085] This invention also contemplates the use of competitive drug screening assays in which neutralizing antibodies capable of binding the protein specifically compete with a test compound capable of binding to the protein or oligopeptide or fragment thereof. One method for high throughput screening using very small assay volumes and very small amounts of test compound is described in U.S. Pat. No. 5,876,946. Molecules or compounds identified by screening may be used in a model system to evaluate their toxicity, diagnostic, or therapeutic potential.

[0086] The protein may be used to purify a ligand from a sample. A method for using a protein to purify a ligand would involve combining the protein or a portion thereof with a sample under conditions to allow specific binding, recovering the bound protein, and using an appropriate chaotropic agent to separate the protein from the purified ligand.

[0087] Production of Antibodies

[0088] A protein encoded by a cDNA of the invention may be used to produce specific antibodies. Antibodies may be produced using an oligopeptide or a portion of the protein with inherent immunological activity. Methods for producing antibodies include: 1) injecting an animal, usually goats, rabbits, or mice, with the protein, or an antigenically-effective portion or an oligopeptide thereof, to induce an immune response; 2) engineering hybridomas to produce monoclonal antibodies; 3) inducing in vivo production in the lymphocyte population; or 4) screening libraries of recombinant immunoglobulins. Recombinant immunoglobulins may be produced as taught in U.S. Pat. No. 4,816,567.

[0089] Antibodies produced using the proteins of the invention are useful for the diagnosis of prepathologic disorders as well as the diagnosis of chronic or acute diseases characterized by abnormalities in the expression, amount, or distribution of the protein. A variety of protocols for competitive binding or immunoradiometric assays using either polyclonal or monoclonal antibodies specific for proteins are well known in the art. Immunoassays typically involve the formation of complexes between a protein and its specific binding molecule or compound and the measurement of complex formation. Immunoassays may employ a two-site, monoclonal-based assay that utilizes monoclonal antibodies reactive to two noninterfering epitopes on a specific protein or a competitive binding assay (Pound (1998) Immunochemical Protocols, Humana Press, Totowa N.J.).

[0090] Immunoassay procedures may be used to quantify expression of the protein in cell cultures, in subjects with a particular disorder or in model animal systems under various conditions. Increased or decreased production of proteins as monitored by immunoassay may contribute to knowledge of the cellular activities associated with developmental pathways, engineered conditions or diseases, or treatment efficacy. The quantity of a given protein in a given tissue may be determined by performing immunoassays on freeze-thawed detergent extracts of biological samples and comparing the slope of the binding curves to binding curves generated by purified protein.

[0091] Labeling of Molecules for Assay

[0092] A wide variety of reporter molecules and conjugation techniques are known by those skilled in the art and may be used in various cDNA, polynucleotide, protein, peptide or antibody assays. Synthesis of labeled molecules may be achieved using commercial kits for incorporation of a labeled nucleotide such as ³²P-dCTP, Cy3-dCTP or Cy5-dCTP or amino acid such as ³⁵S-methionine. Polynucleotides, cDNAs, proteins, or antibodies may be directly labeled with a reporter molecule by chemical conjugation to amines, thiols and other groups present in the molecules using reagents such as BIODIPY or FITC (Molecular Probes, Eugene Oreg.).

[0093] The proteins and antibodies may be labeled for purposes of assay by joining them, either covalently or noncovalently, with a reporter molecule that provides for a detectable signal. A wide variety of labels and conjugation techniques are known and have been reported in the scientific and patent literature including, but not limited to U.S. Pat. Nos. 3,817,837; 3,850,752; 3,939,350; 3,996,345; 4,277,437; 4,275,149; and 4,366,241.

[0094] Diagnostics

[0095] The cDNAs, or fragments thereof, may be used to detect and quantify differential gene expression in breast cancer; absence, presence, or excess expression of mRNAs; or to monitor mRNA levels during therapeutic intervention. These cDNAs can also be utilized as markers of treatment efficacy against breast cancer over a period ranging from several days to months. The diagnostic assay may use hybridization or amplification technology to compare gene expression in a biological sample from a patient to standard samples in order to detect altered gene expression. Qualitative or quantitative methods for this comparison are well known in the art.

[0096] For example, the cDNA may be labeled by standard methods and added to a biological sample from a patient under conditions for hybridization complex formation. After an incubation period, the sample is washed and the amount of label (or signal) associated with hybridization complexes is quantified and compared with a standard value. If the amount of label in the patient sample is significantly altered in comparison to the standard value, then the presence of the associated condition, disease or disorder is indicated.

[0097] In order to provide a basis for the diagnosis of a condition, disease or disorder associated with gene expression, a normal or standard expression profile is established. This may be accomplished by combining a biological sample taken from normal subjects, either animal or human, with a probe under conditions for hybridization or amplification. Standard hybridization may be quantified by comparing the values obtained using normal subjects with values from an experiment in which a known amount of a substantially purified target sequence is used. Standard values obtained in this manner may be compared with values obtained from samples from patients who are symptomatic for a particular condition, disease, or disorder. Deviation from standard values toward those associated with a particular condition is used to diagnose that condition.

[0098] Such assays may also be used to evaluate the efficacy of a particular therapeutic treatment regimen in animal studies and in clinical trial or to monitor the treatment of an individual patient. Once the presence of a condition is established and a treatment protocol is initiated, diagnostic assays may be repeated on a regular basis to determine if the level of expression in the patient begins to approximate that which is observed in a normal subject. The results obtained from successive assays may be used to show the efficacy of treatment over a period ranging from several days to months.

[0099] Gene Expression Profiles

[0100] A gene expression profile comprises a plurality of cDNAs and a plurality of detectable hybridization complexes, wherein each complex is formed by hybridization of one or more probes to one or more complementary sequences in a sample. The cDNA composition of the invention is used as elements on a microarray to analyze gene expression profiles. In one embodiment, the microarray is used to monitor the progression of disease. Researchers can assess and catalog the differences in gene expression between healthy and diseased tissues or cells. By analyzing changes in patterns of gene expression, disease can be diagnosed at earlier stages before the patient is symptomatic. The invention can be used to formulate a prognosis and to design a treatment regimen. The invention can also be used to monitor the efficacy of treatment. For treatments with known side effects, the microarray is employed to improve the treatment regimen. A dosage is established that causes a change in genetic expression patterns indicative of successful treatment. Expression patterns associated with the onset of undesirable side effects are avoided. This approach may be more sensitive and rapid than waiting for the patient to show inadequate improvement, or to manifest side effects, before altering the course of treatment.

[0101] In another embodiment, animal models which mimic a human disease can be used to characterize expression profiles associated with a particular condition, disorder or disease; or treatment of the condition, disorder or disease. Novel treatment regimens may be tested in these animal models using microarrays to establish and then follow expression profiles over time. In addition, microarrays may be used with cell cultures or tissues removed from animal models to rapidly screen large numbers of candidate drug molecules, looking for ones that produce an expression profile similar to those of known therapeutic drugs, with the expectation that molecules with the same expression profile will likely have similar therapeutic effects. Thus, the invention provides the means to rapidly determine the molecular mode of action of a drug.

[0102] Assays Using Antibodies

[0103] Antibodies directed against epitopes on a protein encoded by a cDNA of the invention may be used in assays to quantify the amount of protein found in a particular human cell. Such assays include methods utilizing the antibody and a label to detect expression level under normal or disease conditions. The antibodies may be used with or without modification, and labeled by joining them, either covalently or noncovalently, with a labeling moiety.

[0104] Protocols for detecting and measuring protein expression using either polyclonal or monoclonal antibodies are well known in the art. Examples include ELISA, RIA, and fluorescent activated cell sorting (FACS). Such immunoassays typically involve the formation of complexes between the protein and its specific antibody and the measurement of such complexes. These and other assays are described in Pound (supra). The method may employ a two-site, monoclonal-based immunoassay utilizing monoclonal antibodies reactive to two non-interfering epitopes, or a competitive binding assay. (See, e.g., Coligan et al. (1997) Current Protocols in Immunology, Wiley-Interscience, New York N.Y.; Pound, supra)

[0105] Therapeutics

[0106] The cDNAs and fragments thereof can be used in gene therapy. cDNAs can be delivered ex vivo to target cells, such as cells of bone marrow. Once stable integration and transcription and or translation are confirmed, the bone marrow may be reintroduced into the subject. Expression of the protein encoded by the cDNA may correct a disorder associated with mutation of a normal sequence, reduction or loss of an endogenous target protein, or overexpression of an endogenous or mutant protein. Alternatively, cDNAs may be delivered in vivo using vectors such as retrovirus, adenovirus, adeno-associated virus, herpes simplex virus, and bacterial plasmids. Non-viral methods of gene delivery include cationic liposomes, polylysine conjugates, artificial viral envelopes, and direct injection of DNA (Anderson (1998) Nature 392:25-30; Dachs et al. (1997) Oncol Res 9:313-325; Chu et al. (1998) J Mol Med 76(3-4):184-192; Weiss et al. (1999) Cell Mol Life Sci 55(3):334-358; Agrawal (1996) Antisense Therapeutics, Humana Press, Totowa N.J.; and August et al. (1997) Gene Therapy (Advances in Pharmacology, Vol. 40), Academic Press, San Diego Calif.).

[0107] In addition, expression of a particular protein can be regulated through the specific binding of a fragment of a cDNA to a genomic sequence or an mRNA which encodes the protein or directs its transcription or translation. The cDNA can be modified or derivatized to any RNA-like or DNA-like material including peptide nucleic acids, branched nucleic acids, and the like. These sequences can be produced biologically by transforming an appropriate host cell with a vector containing the sequence of interest.

[0108] Molecules which regulate the activity of the cDNA or encoded protein are useful as therapeutics for breast cancer. Such molecules include agonists which increase the expression or activity of the polynucleotide or encoded protein, respectively; or antagonists which decrease expression or activity of the polynucleotide or encoded protein, respectively. In one aspect, an antibody which specifically binds the protein may be used directly as an antagonist or indirectly as a delivery mechanism for bringing a pharmaceutical agent to cells or tissues which express the protein.

[0109] Additionally, any of the proteins, or their ligands, or complementary nucleic acid sequences may be administered as pharmaceutical compositions or in combination with other appropriate therapeutic agents. Selection of the appropriate agents for use in combination therapy may be made by one of ordinary skill in the art, according to conventional pharmaceutical principles. The combination of therapeutic agents may act synergistically to affect the treatment or prevention of the conditions and disorders associated with an immune response. Using this approach, one may be able to achieve therapeutic efficacy with lower dosages of each agent, thus reducing the potential for adverse side effects. Further, the therapeutic agents may be combined with pharmaceutically-acceptable carriers including excipients and auxiliaries which facilitate processing of the active compounds into preparations which can be used pharmaceutically. Further details on techniques for formulation and administration used by doctors and pharmacists may be found in the latest edition of Remington's Pharmaceutical Sciences (Maack Publishing, Easton Pa.).

[0110] Model Systems

[0111] Animal models may be used as bioassays where they exhibit a phenotypic response similar to that of humans and where exposure conditions are relevant to human exposures. Mammals are the most common models, and most infectious agent, cancer, drug, and toxicity studies are performed on rodents such as rats or mice because of low cost, availability, lifespan, reproductive potential, and abundant reference literature. Inbred and outbred rodent strains provide a convenient model for investigation of the physiological consequences of underexpression or overexpression of genes of interest and for the development of methods for diagnosis and treatment of diseases. A mammal inbred to overexpress a particular gene (for example, secreted in milk) may also serve as a convenient source of the protein expressed by that gene.

[0112] Transgenic Animal Models

[0113] Transgenic rodents that overexpress or underexpress a gene of interest may be inbred and used to model human diseases or to test therapeutic or toxic agents. (See, e.g., U.S. Pat. Nos. 5,175,383 and 5,767,337.) In some cases, the introduced gene may be activated at a specific time in a specific tissue type during fetal or postnatal development. Expression of the transgene is monitored by analysis of phenotype, of tissue-specific mRNA expression, or of serum and tissue protein levels in transgenic animals before, during, and after challenge with experimental drug therapies.

[0114] Embryonic Stem Cells

[0115] Embryonic (ES) stem cells isolated from rodent embryos retain the potential to form embryonic tissues. When ES cells such as the mouse 129/SvJ cell line are placed in a blastocyst from the C57BL/6 mouse strain, they resume normal development and contribute to tissues of the live-born animal. ES cells are preferred for use in the creation of experimental knockout and knockin animals. The method for this process is well known in the art and the steps are: the cDNA is introduced into a vector, the vector is transformed into ES cells, transformed cells are identified and microinjected into mouse cell blastocysts, blastocysts are surgically transferred to pseudopregnant dams. The resulting chimeric progeny are genotyped and bred to produce heterozygous or homozygous strains.

[0116] Knockout Analysis

[0117] In gene knockout analysis, a region of a gene is enzymatically modified to include a non-natural intervening sequence such as the neomycin phosphotransferase gene (neo; Capecchi (1989) Science 244:1288-1292). The modified gene is transformed into cultured ES cells and integrates into the endogenous genome by homologous recombination. The inserted sequence disrupts transcription and translation of the endogenous gene.

[0118] Knockin Analysis

[0119] ES cells can be used to create knockin humanized animals or transgenic animal models of human diseases. With knockin technology, a region of a human gene is injected into animal ES cells, and the human sequence integrates into the animal cell genome. Transgenic progeny or inbred lines are studied and treated with potential pharmaceutical agents to obtain information on the progression and treatment of the analogous human condition.

[0120] As described herein, the uses of the cDNAs, provided in the Sequence Listing of this application, and their encoded proteins are exemplary of known techniques and are not intended to reflect any limitation on their use in any technique that would be known to the person of average skill in the art. Furthermore, the cDNAs provided in this application may be used in molecular biology techniques that have not yet been developed, provided the new techniques rely on properties of nucleotide sequences that are currently known to the person of ordinary skill in the art, e.g., the triplet genetic code, specific base pair interactions, and the like. Likewise, reference to a method may include combining more than one method for obtaining or assembling full length cDNA sequences that will be known to those skilled in the art. It is also to be understood that this invention is not limited to the particular methodology, protocols, and reagents described, as these may vary. It is also understood that the terminology used herein is for the purpose of describing particular embodiments only, and is not intended to limit the scope of the present invention which will be limited only by the appended claims. The examples below are provided to illustrate the subject invention and are not included for the purpose of limiting the invention.

### EXAMPLES

[0121] I Construction of cDNA Libraries

[0122] RNA was purchased from Clontech Laboratories (Palo Alto Calif.) or isolated from various tissues. Some tissues were homogenized and lysed in guanidinium isothiocyanate, while others were homogenized and lysed in phenol or in a suitable mixture of denaturants, such as TRIZOL reagent (Life Technologies, Rockville Md.). The resulting lysates were centrifuged over CsCl cushions or extracted with chloroform. RNA was precipitated with either isopropanol or ethanol and sodium acetate, or by other routine methods.

[0123] Phenol extraction and precipitation of RNA were repeated as necessary to increase RNA purity. In most cases, RNA was treated with DNase. For most libraries, poly(A) RNA was isolated using oligo d(T)-coupled paramagnetic particles (Promega), OLIGOTEX latex particles (Qiagen, Valencia Calif.), or an OLIGOTEX mRNA purification kit (Qiagen). Alternatively, poly(A) RNA was isolated directly from tissue lysates using other kits, including the POLY(A)PURE mRNA purification kit (Ambion, Austin Tex.).

[0124] In some cases, Stratagene (La Jolla Calif.) was provided with RNA and constructed the corresponding cDNA libraries. Otherwise, cDNA was synthesized and cDNA libraries were constructed with the UNIZAP vector system (Stratagene) or SUPERSCRIPT plasmid system (Life Technologies) using the recommended procedures or similar methods known in the art. (See Ausubel, supra, Units 5.1 through 6.6.) Reverse transcription was initiated using oligo d(T) or random primers. Synthetic oligonucleotide adapters were ligated to double stranded cDNA, and the cDNA was digested with the appropriate restriction enzyme or enzymes. For most libraries, the cDNA was size-selected (300-1000 bp) using SEPHACRYL S1000, SEPHAROSE CL2B, or SEPHAROSE CL4B column chromatography (APB) or preparative agarose gel electrophoresis. cDNAs were ligated into compatible restriction enzyme sites of the polylinker of the pBLUESCRIPT phagemid (Stratagene), pSPORT1 plasmid (Life Technologies), or pINCY plasmid (Incyte Genomics, Inc., Palo Alto Calif.). Recombinant plasmids were transformed into XL1-BLUE, XL1-BLUEMRF, or SOLR competent E. coli cells (Stratagene) or DHII5α, DH10B, or ELECTROMAX DH10B competent E. coli cells (Life Technologies).

[0125] In some cases, libraries were superinfected with a 5× excess of the helper phage, M13K07, according to the method of Vieira et al. (1987, Methods Enzymol. 153:3-11) and normalized or subtracted using a methodology adapted from Soares (1994, Proc Natl Acad Sci 91:9228-9232), Swaroop et al. (1991, Nucl Acids Res 19:1954), and Bonaldo et al. (1996, Genome Research 6:791-806). The modified Soares normalization procedure was utilized to reduce the repetitive cloning of highly expressed high abundance cDNAs while maintaining the overall sequence complexity of the library. Modification included significantly longer hybridization times which allowed for increased gene discovery rates by biasing the normalized libraries toward those infrequently expressed low-abundance cDNAs which are poorly represented in a standard transcript image (Soares et al., supra).

[0126] II Isolation and Sequencing of cDNA Clones

[0127] Plasmids were recovered from host cells by in vivo excision using the UNIZAP vector system (Stratagene) or by cell lysis. Plasmids were purified using one of the following: the Magic or WIZARD MINIPREPS DNA purification system (Promega); the AGTC MINIPREP purification kit (Edge BioSystems, Gaithersburg Md.); the QIAWELL 8, QIAWELL 8 Plus, or QIAWELL 8 Ultra plasmid purification systems, or the REAL PREP 96 plasmid purification kit (QIAGEN). Following precipitation, plasmids were resuspended in 0.1 ml of distilled water and stored, with or without lyophilization, at 4° C.

[0128] Alternatively, plasmid DNA was amplified from host cell lysates using direct link PCR in a high-throughput format (Rao (1994) Anal Biochem 216:1-14). Host cell lysis and thermal cycling steps were carried out in a single reaction mixture. Samples were processed and stored in 384-well plates, and the concentration of amplified plasmid DNA was quantified fluorometrically using PICOGREEN dye (Molecular Probes) and a FLUOROSKAN II fluorescence scanner (Labsystems Oy, Helsinki, Finland).

[0129] cDNA sequencing reactions were processed using standard methods or high-throughput instrumentation such as the ABI CATALYST 800 thermal cycler (Applied Biosystems) or the DNA ENGINE thermal cycler (M J Research, Watertown Mass.) in conjunction with the HYDRA microdispenser (Robbins Scientific, Sunnyvale Calif.) or the MICROLAB 2200 system (Hamilton, Reno Nev.). cDNA sequencing reactions were prepared using reagents provided by APB or supplied in ABI sequencing kits such as the ABI PRISM BIGDYE cycle sequencing kit (Applied Biosystems). Electrophoretic separation of cDNA sequencing reactions and detection of labeled cDNAs were carried out using the MEGABACE 1000 DNA sequencing system (APB); the ABI PRISM 373 or 377 sequencing systems (Applied Biosystems) in conjunction with standard ABI protocols and base calling software; or other sequence analysis systems known in the art. Reading frames within the cDNA sequences were identified using standard methods (reviewed in Ausubel, supra, Unit 7.7).

[0130] III Extension of cDNA Sequences

[0131] Nucleic acid sequences were extended using the cDNA clones and oligonucleotide primers. One primer was synthesized to initiate 5′ extension of the known fragment, and the other, to initiate 3′ extension of the known fragment. The initial primers were designed using OLIGO 4.06 software (National Biosciences), or another appropriate program, to be about 22 to 30 nucleotides in length, to have a GC content of about 50% or more, and to anneal to the target sequence at temperatures of about 68° C. to about 72° C. Any stretch of nucleotides which would result in hairpin structures and primer-primer dimerizations was avoided.

[0132] Selected human cDNA libraries were used to extend the sequence. If more than one extension was necessary or desired, additional or nested sets of primers were designed. Preferred libraries are ones that have been size-selected to include larger cDNAs. Also, random primed libraries are preferred because they will contain more sequences with the 5′ and upstream regions of genes. A randomly primed library is particularly useful if an oligo d(T) library does not yield a full-length cDNA.

[0133] High fidelity amplification was obtained by PCR using methods well known in the art. PCR was performed in 96-well plates using the DNA ENGINE thermal cycler (MJ Research). The reaction mix contained DNA template, 200 nmol of each primer, reaction buffer containing Mg²⁺, (NH₄)₂SO₄, and β-mercaptoethanol, Taq DNA polymerase (APB), ELONGASE enzyme (Life Technologies), and Pfu DNA polymerase (Stratagene), with the following parameters for primer pair PCI A and PCI B (Incyte Genomics): Step 1: 94° C., 3 min; Step 2: 94° C., 15 sec; Step 3: 60° C., 1 min; Step 4: 68° C., 2 min; Step 5: Steps 2, 3, and 4 repeated 20 times; Step 6: 68° C., 5 min; Step 7: storage at 4° C. In the alternative, the parameters for primer pair T7 and SK+ (Stratagene) were as follows: Step 1: 94° C., 3 min; Step 2: 94° C., 15 sec; Step 3: 57° C., 1 min; Step 4: 68° C., 2 min; Step 5: Steps 2, 3, and 4 repeated 20 times; Step 6: 68° C., 5 min; Step 7: storage at 4° C.

[0134] The concentration of DNA in each well was determined by dispensing 100 μl PICOGREEN reagent (0.25% reagent in 1×TE, v/v; Molecular Probes) and 0.5 μl of undiluted PCR product into each well of an opaque fluorimeter plate (Corning Costar, Acton Mass.) and allowing the DNA to bind to the reagent. The plate was scanned in a FLUOROSKAN II (Labsystems Oy) to measure the fluorescence of the sample and to quantify the concentration of DNA. A 5 μl to 10 μl aliquot of the reaction mixture was analyzed by electrophoresis on a 1% agarose mini-gel to determine which reactions were successful in extending the sequence.

[0135] The extended nucleic acids were desalted and concentrated, transferred to 384-well plates, digested with CviJI cholera virus endonuclease (Molecular Biology Research, Madison Wis.), and sonicated or sheared prior to religation into pUC18 vector (APB). For shotgun sequencing, the digested nucleic acids were separated on low concentration (0.6 to 0.8%) agarose gels, fragments were excised, and agar digested with AGARACE enzyme (Promega). Extended clones were religated using T4 DNA ligase (New England Biolabs, Beverly Mass.) into pUC18 vector (APB), treated with Pfu DNA polymerase (Stratagene) to fill-in restriction site overhangs, and transformed into competent E. coli cells. Transformed cells were selected on antibiotic-containing media, and individual colonies were picked and cultured overnight at 37° C. in 384-well plates in LB/2× carbenicillin liquid media.

[0136] The cells were lysed, and DNA was amplified by PCR using Taq DNA polymerase (APB) and Pfu DNA polymerase (Stratagene) with the following parameters: Step 1: 94° C., 3 min; Step 2: 94° C., 15 sec; Step 3: 60° C., 1 min; Step 4: 72° C., 2 min; Step 5: steps 2, 3, and 4 repeated 29 times; Step 6: 72° C., 5 min; Step 7: storage at 4° C. DNA was quantified using PICOGREEN reagent (Molecular Probes) as described above. Samples with low DNA recoveries were reamplified using the same conditions described above. Samples were diluted with 20% dimethylsulfoxide (DMSO; 1:2, v/v), and sequenced using DYENAMIC energy transfer sequencing primers and the DYENAMIC DIRECT cycle sequencing kit (APB) or the ABI PRISM BIGDYE terminator cycle sequencing kit (Applied Biosystems).

[0137] IV Assembly and Analysis of Sequences

[0138] Component nucleotide sequences from chromatograms were subjected to PHRED analysis (Phil Green, University of Washington, Seattle Wash.) and assigned a quality score. The sequences having at least a required quality score were subject to various pre-processing algorithms to eliminate low quality 3′ ends, vector and linker sequences, polyA tails, Alu repeats, mitochondrial and ribosomal sequences, bacterial contamination sequences, and sequences smaller than 50 base pairs. Sequences were screened using the BLOCK 2 program (Incyte Genomics), a motif analysis program based on sequence information contained in the SWISS-PROT and PROSITE databases (Bairoch et al. (1997) Nucleic Acids Res 25:217-221; Attwood et al. (1997) J Chem Inf Comput Sci 37:417-424).

[0139] Processed sequences were subjected to assembly procedures in which the sequences were assigned to bins, one sequence per bin. Sequences in each bin were assembled to produce consensus sequences, templates. Subsequent new sequences were added to existing bins using BLAST (Altschul (supra); Altschul et al. (supra); Karlin et al. (1988) Proc Natl Acad Sci 85:841-845), BLASTn (vers. 1.4, WashU), and CROSSMATCH software (Phil Green, supra). Candidate pairs were identified as all BLAST hits having a quality score greater than or equal to 150. Alignments of at least 82% local identity were accepted into the bin. The component sequences from each bin were assembled using PHRAP (Phil Green, supra). Bins with several overlapping component sequences were assembled using DEEP PHRAP (Phil Green, supra).

[0140] Bins were compared against each other, and those having local similarity of at least 82% were combined and reassembled. Reassembled bins having templates of insufficient overlap (less than 95% local identity) were re-split. Assembled templates were also subjected to analysis by STITCHER/EXON MAPPER algorithms which analyzed the probabilities of the presence of splice variants, alternatively spliced exons, splice junctions, differential expression of alternative spliced genes across tissue types, disease states, and the like. These resulting bins were subjected to several rounds of the above assembly procedures to generate the template sequences found in the LIFESEQ GOLD database (Incyte Genomics).

[0141] The assembled templates were annotated using the following procedure. Template sequences were analyzed using BLASTn (vers. 2.0, NCBI) versus GBpri (GenBank vers. 117). “Hits” were defined as an exact match having from 95% local identity over 200 base pairs through 100% local identity over 100 base pairs, or a homolog match having an E-value equal to or greater than 1×10⁻⁸. (The “E-value” quantifies the statistical probability that a match between two sequences occurred by chance). The hits were subjected to frameshift FASTx versus GENPEPT (GenBank version 117). In this analysis, a homolog match was defined as having an E-value of 1×10⁻⁸. The assembly method used above was described in U.S. Ser. No. 09/276,534, filed Mar. 25, 1999, and the LIFESEQ GOLD user manual (Incyte Genomics).

[0142] Following assembly, template sequences were subjected to motif, BLAST, Hidden Markov Model (HMM; Pearson and Lipman (1988) Proc Natl Acad Sci 85:2444-2448; Smith and Waterman (1981) J Mol Biol 147:195-197), and functional analyses, and categorized in protein hierarchies using methods described in U.S. Ser. No. 08/812,290, filed Mar. 6, 1997; U.S. Ser. No. 08/947,845, filed Oct. 9, 1997; U.S. Pat. No. 5,953,727; and U.S. Ser. No. 09/034,807, filed Mar. 4, 1998. Template sequences may be further queried against public databases such as the GenBank rodent, mammalian, vertebrate, eukaryote, prokaryote, and human EST databases.

[0143] V Selection of Sequences, Microarray Preparation and Use

[0144] Incyte clones represent template sequences derived from the LIFESEQ GOLD assembled human sequence database (Incyte Genomics). In cases where more than one clone was available for a particular template, the 5′-most clone in the template was used on the microarray. The HUMAN GENOME GEM series 1-3 microarrays (Incyte Genomics) contain 28,626 array elements which represent 10,068 annotated clusters and 18,558 unannotated clusters. For the UNIGEM series microarrays (Incyte Genomics), Incyte clones were mapped to non-redundant Unigene clusters (Unigene database (build 46), NCBI; Shuler (1997) J Mol Med 75:694-698), and the 5′ clone with the strongest BLAST alignment (at least 90% identity and 100 bp overlap) was chosen, verified, and used in the construction of the microarray. The UNIGEM V microarray (Incyte Genomics) contains 7075 array elements which represent 4610 annotated genes and 2,184 unannotated clusters. Table 5 shows the GenBank annotations for SEQ ID NOs:1-194 of this invention as produced by BLAST analysis.

[0145] To construct microarrays, cDNAs were amplified from bacterial cells using primers complementary to vector sequences flanking the cDNA insert. Thirty cycles of PCR increased the initial quantity of cDNAs from 1-2 ng to a final quantity greater than 5 μg. Amplified cDNAs were then purified using SEPIIACRYL-400 columns (APB). Purified cDNAs were immobilized on polymer-coated glass slides. Glass microscope slides (Corning, Corning N.Y.) were cleaned by ultrasound in 0.1% SDS and acetone, with extensive distilled water washes between and after treatments. Glass slides were etched in 4% hydrofluoric acid (VWR Scientific Products, West Chester Pa.), washed thoroughly in distilled water, and coated with 0.05% aminopropyl silane (Sigma Aldrich) in 95% ethanol. Coated slides were cured in a 110° C. oven. cDNAs were applied to the coated glass substrate using a procedure described in U.S. Pat. No. 5,807,522. One microliter of the cDNA at an average concentration of 100 ng/ul was loaded into the open capillary printing element by a high-speed robotic apparatus which then deposited about 5 nl of cDNA per slide.

[0146] Microarrays were UV-crosslinked using a STRATALINKER UV-crosslinker (Stratagene), and then washed at room temperature once in 0.2% SDS and three times in distilled water. Non-specific binding sites were blocked by incubation of microarrays in 0.2% casein in phosphate buffered saline (Tropix, Bedford Mass.) for 30 minutes at 60° C. followed by washes in 0.2% SDS and distilled water as before.

[0147] VI Preparation of Samples

[0148] Propagation of Human Epithelial Cell Lines

[0149] HMEC is a human primary mammary epithelial cell strain derived from normal mammary tissue (Clonetics San Diego, Calif.). The following cell lines were obtained from ATCC (Manassus, Va.): MCF10A is a breast mammary gland cell line derived from a 36-year old female with fibrocystic breast disease; MCF7 is a breast adenocarcinoma cell line derived from the pleural effusion of a 69-year old female; T47D is a breast carcinoma cell line derived from a pleural effusion from a 54-year old female with an infiltrating ductal carcinoma of the breast; BT20 is a breast carcinoma cell line derived in vitro from cells emigrating out of thin slices of a tumor mass isolated from a 74-year old female; MDA-mb-231 is a metastatic breast tumor cell line derived from the pleural effusion of a 51-year old female with metastatic breast carcinoma. All cell cultures were propagated in media according to the supplier's recommendations and grown to 70-80% confluence prior to RNA isolation.

[0150] Isolation and Labeling of Sample cDNAs

[0151] Cells were harvested and lysed in 1 ml of TRIZOL reagent (5×10⁶ cells/ml; Life Technologies). The lysates were vortexed thoroughly and incubated at room temperature for 2-3 minutes and extracted with 0.5 ml chloroform. The extract was mixed, incubated at room temperature for 5 minutes, and centrifuged at 15,000 rpm for 15 minutes at 4° C. The aqueous layer was collected and an equal volume of isopropanol was added. Samples were mixed, incubated at room temperature for 10 minutes, and centrifuged at 15,000 rpm for 20 minutes at 4° C. The supernatant was removed and the RNA pellet was washed with 1 ml of 70% ethanol, centrifuged at 15,000 rpm at 4° C., and resuspended in RNase-free water. The concentration of the RNA was determined by measuring the optical density at 260 nm.

[0152] Poly(A) RNA was prepared using an OLIGOTEX mRNA kit (QIAGEN) with the following modifications: OLIGOTEX beads were washed in tubes instead of on spin columns, resuspended in elution buffer, and then loaded onto spin columns to recover mRNA. To obtain maximum yield, the mRNA was eluted twice.

[0153] Each poly(A) RNA sample was reverse transcribed using MMLV reverse-transcriptase, 0.05 pg/μl oligo-d(T) primer (21 mer), 1× first strand buffer, 0.03 units/ul RNase inhibitor, 500 uM dATP, 500 uM dGTP, 500 uM dTTP, 40 uM dCTP, and 40 uM either dCTP-Cy3 or dCTP-Cy5 (APB). The reverse transcription reaction was performed in a 25 ml volume containing 200 ng poly(A) RNA using the GEMBRIGHT kit (Incyte Genomics). Specific control poly(A) RNAs (YCFR06, YCFR45, YCFR67, YCFR85, YCFR43, YCFR22, YCFR23, YCFR25, YCFR44, YCFR26) were synthesized by in vitro transcription from non-coding yeast genomic DNA (W. Lei, unpublished). As quantitative controls, control mRNAs (YCFR06, YCFR45, YCFR67, and YCFR85) at 0.002 ng, 0.02 ng, 0.2 ng, and 2 ng were diluted into reverse transcription reaction at ratios of 1:100,000, 1:10,000, 1:1000, 1:100 (w/w) to sample mRNA, respectively. To sample differential expression patterns, control mRNAs (YCFR43, YCFR22, YCFR23, YCFR25, YCFR44, YCFR26) were diluted into reverse transcription reaction at ratios of 1:3, 3:1, 1:10, 10:1, 1:25, 25:1 (w/w) to sample mRNA. Reactions were incubated at 37° C. for 2 hr, treated with 2.5 ml of 0.5M sodium hydroxide, and incubated for 20 minutes at 85° C. to the stop the reaction and degrade the RNA.

[0154] cDNAs were purified using two successive CHROMA SPIN 30 gel filtration spin columns (Clontech). Cy3- and Cy1-labeled reaction samples were combined as described below and ethanol precipitated using 1 ml of glycogen (1 mg/ml), 60 ml sodium acetate, and 300 ml of 100% ethanol. The cDNAs were then dried to completion using a SpeedVAC system (Savant Instruments, Holbrook N.Y.) and resuspended in 14 μl 5× SSC, 0.2% SDS.

[0155] VII Hybridization and Detection

[0156] Hybridization reactions contained 9 μl of sample mixture containing 0.2 μg each of Cy3 and Cy5 labeled cDNA synthesis products in 5× SSC, 0.2% SDS hybridization buffer. The mixture was heated to 65° C. for 5 minutes and was aliquoted onto the microarray surface and covered with an 1.8 cm² coverslip. The microarrays were transferred to a waterproof chamber having a cavity just slightly larger than a microscope slide. The chamber was kept at 100% humidity internally by the addition of 140 μl of 5× SSC in a corner of the chamber. The chamber containing the microarrays was incubated for about 6.5 hours at 60° C. The microarrays were washed for 10 min at 45° C. in low stringency wash buffer (1× SSC, 0.1% SDS), three times for 10 minutes each at 45° C. in high stringency wash buffer (0.1× SSC), and dried.

[0157] Reporter-labeled hybridization complexes were detected with a microscope equipped with an Innova 70 mixed gas 10 W laser (Coherent, Santa Clara Calif.) capable of generating spectral lines at 488 nm for excitation of Cy3 and at 632 nm for excitation of Cy5. The excitation laser light was focused on the microarray using a 20× microscope objective (Nikon, Melville N.Y.). The slide containing the microarray was placed on a computer-controlled X-Y stage on the microscope and raster-scanned past the objective. The 1.8 cm×1.8 cm microarray used in the present example was scanned with a resolution of 20 micrometers.

[0158] In two separate scans, the mixed gas multiline laser excited the two fluorophores sequentially. Emitted light was split, based on wavelength, into two photomultiplier tube detectors (PMT R1477; Hamamatsu Photonics Systems, Bridgewater N.J.) corresponding to the two fluorophores. Appropriate filters positioned between the microarray and the photomultiplier tubes were used to filter the signals. The emission maxima of the fluorophores used were 565 nm for Cy3 and 650 nm for Cy1. Each microarray was typically scanned twice, one scan per fluorophore using the appropriate filters at the laser source, although the apparatus was capable of recording the spectra from both fluorophores simultaneously.

[0159] The sensitivity of the scans was calibrated using the signal intensity generated by a cDNA control species. Samples of the calibrating cDNA were separately labeled with the two fluorophores and identical amounts of each were added to the hybridization mixture. A specific location on the microarray contained a complementary DNA sequence, allowing the intensity of the signal at that location to be correlated with a weight ratio of hybridizing species of 1:100,000.

[0160] The output of the photomultiplier tube was digitized using a 12-bit RTI-835H analog-to-digital (A/D) conversion board (Analog Devices, Norwood, Mass.) installed in an IBM-compatible PC computer. The digitized data were displayed as an image where the signal intensity was mapped using a linear 20-color transformation to a pseudocolor scale ranging from blue (low signal) to red (high signal). The data was also analyzed quantitatively. Where two different fluorophores were excited and measured simultaneously, the data were first corrected for optical crosstalk (due to overlapping emission spectra) between the fluorophores using each fluorophore's emission spectrum.

[0161] A grid was superimposed over the fluorescence signal image such that the signal from each spot was centered in each element of the grid. The fluorescence signal within each element was then integrated to obtain a numerical value corresponding to the average intensity of the signal. The software used for signal analysis was the GEMTOOLS gene expression analysis program (Incyte Genomics). Significance was defined as signal to background ratio exceeding 2× and area hybridization exceeding 40%.

[0162] VIII Data Analysis and Results

[0163] The expression of cDNAs from the four tumor cell lines representing various stages of breast tumor progression (MCF7, T47D, BT20, and MDA-mb-231) were compared with that of two non-malignant mammary epithelial cell lines, HMEC and MCF10A. Array elements that exhibited at least a 3-fold change in expression and a signal intensity over 250 units, a signal-to-background ratio of at least 2.5, and an element spot size of at least 40% were identified as differentially expressed using the GEMTOOLS program (Incyte Genomics). Moreover, only array elements were selected that exhibited these changes in at least two tumor cell lines compared with both non-malignant controls. The cDNAs that are differentially expressed under these conditions are shown in Table 1. Table 1 identifies both upregulated and downregulated cDNAs. Downregulated cDNAs are indicated by a minus (−) sign. The cDNAs are identified by their Incyte Clone ID. These genes are useful diagnostic markers or as potential therapeutic targets for breast cancer, particularly in its early stages prior to metastasis.

[0164] Table 2 identifies upregulated and downregulated cDNAs that are differentially expressed in the metastatic MDA-mb-231 breast carcinoma cell line that are not differentially expressed in the tumorigenic but non-metastatic cell lines MCF7, T47D, and BT20. These genes are useful diagnostic markers or potential therapeutic targets for an advanced stage of breast cancer where metastasis to other organs or tissues may have occurred, or may potentially occur.

[0165] IX Other Hybridization Technologies and Analyses

[0166] Other hybridization technologies utilize a variety of substrates such as nylon membranes, capillary tubes, etc. Arranging cDNAs on polymer coated slides is described in Example V; sample cDNA preparation and hybridization and analysis using polymer coated slides is described in examples VI and VII, respectively.

[0167] The cDNAs are applied to a membrane substrate by one of the following methods. A mixture of cDNAs is fractionated by gel electrophoresis and transferred to a nylon membrane by capillary transfer. Alternatively, the cDNAs are individually ligated to a vector and inserted into bacterial host cells to form a library. The cDNAs are then arranged on a substrate by one of the following methods. In the first method, bacterial cells containing individual clones are robotically picked and arranged on a nylon membrane. The membrane is placed on LB agar containing selective agent (carbenicillin, kanamycin, ampicillin, or chloramphenicol depending on the vector used) and incubated at 37° C. for 16 hr. The membrane is removed from the agar and consecutively placed colony side up in 10% SDS, denaturing solution (1.5 M NaCl, 0.5 M NaOH), neutralizing solution (1.5 M NaCl, 1 M Tris, pH 8.0), and twice in 2×SSC for 10 min each. The membrane is then UV irradiated in a STRATALINKER UV-crosslinker (Stratagene).

[0168] In the second method, cDNAs are amplified from bacterial vectors by thirty cycles of PCR using primers complementary to vector sequences flanking the insert. PCR amplification increases a starting concentration of 1-2 ng nucleic acid to a final quantity greater than 5 μg. Amplified nucleic acids from about 400 bp to about 5000 bp in length are purified using SEPHACRYL-400 beads (APB). Purified nucleic acids are arranged on a nylon membrane manually or using a dot/slot blotting manifold and suction device and are immobilized by denaturation, neutralization, and UV irradiation as described above.

[0169] Hybridization probes derived from cDNAs of the Sequence Listing are employed for screening cDNAs, mRNAs, or genomic DNA in membrane-based hybridizations. Probes are prepared by diluting the cDNAs to a concentration of 40-50 ng in 45 μl TE buffer, denaturing by heating to 100° C. for five min and briefly centrifuging. The denatured cDNA is then added to a REDIPRIME tube (APB), gently mixed until blue color is evenly distributed, and briefly centrifuged. Five microliters of [³²P]dCTP is added to the tube, and the contents are incubated at 37° C. for 10 min. The labeling reaction is stopped by adding 5 μl of 0.2M EDTA, and probe is purified from unincorporated nucleotides using a PROBEQUANT G-50 microcolumn (APB). The purified probe is heated to 100° C. for five min and then snap cooled for two min on ice.

[0170] Membranes are pre-hybridized in hybridization solution containing 1% Sarkosyl and 1× high phosphate buffer (0.5 M NaCl, 0.1 M Na₂HPO₄, 5 mM EDTA, pH 7) at 55° C. for two hr. The probe, diluted in 15 ml fresh hybridization solution, is then added to the membrane. The membrane is hybridized with the probe at 55° C. for 16 hr. Following hybridization, the membrane is washed for 15 min at 25° C. in 1 mM Tris (pH 8.0), 1% Sarkosyl, and four times for 15 min each at 25° C. in 1 mM Tris (pH 8.0). To detect hybridization complexes, XOMAT-AR film (Eastman Kodak, Rochester N.Y.) is exposed to the membrane overnight at −70° C., developed, and examined.

[0171] X Further Characterization of Differentially Expressed cDNAs and Proteins

[0172] Clones were blasted against the LIFESEQ Gold 5.1 database (Incyte Genomics) and an Incyte template and its sequence variants were chosen for each clone. The template and variant sequences were blasted against GenBank database to acquire annotation. The nucleotide sequences were translated into amino acid sequence which was blasted against the GenPept and other protein databases to acquire annotation and characterization, i.e., structural motifs.

[0173] Percent sequence identity can be determined electronically for two or more amino acid or nucleic acid sequences using the MEGALIGN program (DNASTAR). The percent identity between two amino acid sequences is calculated by dividing the length of sequence A, minus the number of gap residues in sequence A, minus the number of gap residues in sequence B, into the sum of the residue matches between sequence A and sequence B, times one hundred. Gaps of low or of no homology between the two amino acid sequences are not included in determining percentage identity.

[0174] Sequences with conserved protein motifs may be searched using the BLOCKS search program. This program analyses sequence information contained in the Swiss-Prot and PROSITE databases and is useful for determining the classification of uncharacterized proteins translated from genomic or cDNA sequences (Bairoch et al. (supra); Attwood et al. (supra). PROSITE database is a useful source for identifying functional or structural domains that are not detected using motifs due to extreme sequence divergence. Using weight matrices, these domains are calibrated against the SWISS-PROT database to obtain a measure of the chance distribution of the matches.

[0175] The PRINTS database can be searched using the BLIMPS search program to obtain protein family “fingerprints”. The PRINTS database complements the PROSITE database by exploiting groups of conserved motifs within sequence alignments to build characteristic signatures of different protein families. For both BLOCKS and PRINTS analyses, the cutoff scores for local similarity were: >1300=strong, 1000-1300=suggestive; for global similarity were: p<exp-3; and for strength (degree of correlation) were: >1300=strong, 1000-1300=weak.

[0176] XI Expression of the Encoded Protein

[0177] Expression and purification of a protein encoded by a cDNA of the invention is achieved using bacterial or virus-based expression systems. For expression in bacteria, cDNA is subcloned into a vector containing an antibiotic resistance gene and an inducible promoter that directs high levels of cDNA transcription. Examples of such promoters include, but are not limited to, the trp-lac (tac) hybrid promoter and the T5 or T7 bacteriophage promoter in conjunction with the lac operator regulatory element. Recombinant vectors are transformed into bacterial hosts, such as BL21 (DE3). Antibiotic resistant bacteria express the protein upon induction with IPTG. Expression in eukaryotic cells is achieved by infecting Spodoptera frugiperda (Sf9) insect cells with recombinant baculovirus, Autographica californica nuclear polyhedrosis virus. The polyhedrin gene of baculovirus is replaced with the cDNA by either homologous recombination or bacterial-mediated transposition involving transfer plasmid intermediates. Viral infectivity is maintained and the strong polyhedrin promoter drives high levels of transcription.

[0178] For ease of purification, the protein is synthesized as a fusion protein with glutathione-S-transferase (GST; APB) or a similar alternative such as FLAG. The fusion protein is purified on immobilized glutathione under conditions that maintain protein activity and antigenicity. After purification, the GST moiety is proteolytically cleaved from the protein with thrombin. A fusion protein with FLAG, an 8-amino acid peptide, is purified using commercially available monoclonal and polyclonal anti-FLAG antibodies (Eastman Kodak, Rochester N.Y.).

[0179] XII Production of Specific Antibodies

[0180] A denatured protein from a reverse phase HPLC separation is obtained in quantities up to 75 mg. This denatured protein is used to immunize mice or rabbits following standard protocols. About 100 μg is used to immunize a mouse, while up to 1 mg is used to immunize a rabbit. The denatured protein is radioiodinated and incubated with murine B-cell hybridomas to screen for monoclonal antibodies. About 20 mg of protein is sufficient for labeling and screening several thousand clones.

[0181] In another approach, the amino acid sequence translated from a cDNA of the invention is analyzed using PROTEAN software (DNASTAR) to determine regions of high antigenicity, essentially antigenically-effective epitopes of the protein. The optimal sequences for immunization are usually at the C-terminus, the N-terminus, and those intervening, hydrophilic regions of the protein that are likely to be exposed to the external environment when the protein is in its natural conformation. Typically, oligopeptides about 15 residues in length are synthesized using an ABI 431 peptide synthesizer (Applied Biosystems) using Fmoc-chemistry and then coupled to keyhole limpet hemocyanin (KLH; Sigma Aldrich) by reaction with M-maleimidobenzoyl-N-hydroxysuccinimide ester. If necessary, a cysteine may be introduced at the N-terminus of the peptide to permit coupling to KLH. Rabbits are immunized with the oligopeptide-KLH complex in complete Freund's adjuvant. The resulting antisera are tested for antipeptide activity by binding the peptide to plastic, blocking with 1% BSA, reacting with rabbit antisera, washing, and reacting with radioiodinated goat anti-rabbit IgG.

[0182] Hybridomas are prepared and screened using standard techniques. Hybridomas of interest are detected by screening with radioiodinated protein to identify those fusions producing a monoclonal antibody specific for the protein. In a typical protocol, wells of 96 well plates (FAST, Becton-Dickinson, Palo Alto Calif.) are coated with affinity-purified, specific rabbit-anti-mouse (or suitable anti-species Ig) antibodies at 10 mg/ml. The coated wells are blocked with 1% BSA and washed and exposed to supernatants from hybridomas. After incubation, the wells are exposed to radiolabeled protein at 1 mg/ml. Clones producing antibodies bind a quantity of labeled protein that is detectable above background.

[0183] Such clones are expanded and subjected to 2 cycles of cloning at 1 cell/3 wells. Cloned hybridomas are injected into pristane-treated mice to produce ascites, and monoclonal antibody is purified from the ascitic fluid by affinity chromatography on protein A (APB). Monoclonal antibodies with affinities of at least 10⁸ M⁻¹, preferably 10⁹ to 10¹⁰ M⁻¹ or stronger, are made by procedures well known in the art.

[0184] XIII Purification of Naturally Occurring Protein Using Specific Antibodies

[0185] Naturally occurring or recombinant protein is substantially purified by immunoaffinity chromatography using antibodies specific for the protein. An immunoaffinity column is constructed by covalently coupling the antibody to CNBr-activated SEPHAROSE resin (APB). Media containing the protein is passed over the immunoaffinity column, and the column is washed using high ionic strength buffers in the presence of detergent to allow preferential absorbance of the protein. After coupling, the protein is eluted from the column using a buffer of pH 2-3 or a high concentration of urea or thiocyanate ion to disrupt antibody/protein binding, and the protein is collected.

[0186] XIV Screening Molecules for Specific Binding with the cDNA or Protein

[0187] The cDNA or fragments thereof and the protein or portions thereof are labeled with ³²P-dCTP, Cy3-dCTP, Cy5-dCTP (APB), or BIODIPY or FITC (Molecular Probes), respectively. Candidate molecules or compounds previously arranged on a substrate are incubated in the presence of labeled nucleic or amino acid. After incubation under conditions for either a cDNA or a protein, the substrate is washed, and any position on the substrate retaining label, which indicates specific binding or complex formation, is assayed. The binding molecule is identified by its arrayed position on the substrate. Data obtained using different concentrations of the nucleic acid or protein are used to calculate affinity between the labeled nucleic acid or protein and the bound molecule. High throughput screening using very small assay volumes and very small amounts of test compound is fully described in Burbaum et al. U.S. Pat. No. 5,876,946.

[0188] All patents and publications mentioned in the specification are incorporated herein by reference. Various modifications and variations of the described method and system of the invention will be apparent to those skilled in the art without departing from the scope and spirit of the invention. Although the invention has been described in connection with specific preferred embodiments, it should be understood that the invention as claimed should not be unduly limited to such specific embodiments. Indeed, various modifications of the described modes for carrying out the invention that are obvious to those skilled in the field of molecular biology or related fields are intended to be within the scope of the following claims.

TABLE 1

| | Differential | Tumor Cell Lines vs | Tumor Cell Lines |
|---|---|---|---|
| Clone ID | Expression | MCF10A | vs HMEC |
| 67577 | −4.4 | 1,2,3 | 1,2,3 |
| 275384 | 3.8 | 1,2 | 1,2,3 |
| 557538 | −5.3 | 1,2,3,4 | 1,2,3,4 |
| 797406 | −14.3 | 1,2,3 | 1,3 |
| 855445 | −3.4 | 1,2,3 | 1,2 |
| 869890 | 4.2 | 1,2 | 1,2,3 |
| 894512 | 3.9 | 1,2 | 1,2 |
| 927392 | −3.1 | 1,2,3 | 1,2,3 |
| 1237437 | −3.2 | 2,3,4 | 2,3,4 |
| 1306707 | −12.9 | 1,2 | 1,2,3 |
| 1402715 | −3.5 | 1,2,3 | 1,2,3 |
| 1423848 | 11.6 | 2,3 | 2,3 |
| 1426114 | −3.8 | 1,2 | 1,2 |
| 1505373 | −3.5 | 1,2,3,4 | 1,4 |
| 1522716 | −8 | 1,2,3 | 1,2,3 |
| 1628341 | −5.2 | 1,2,3,4 | 1,2,3,4 |
| 1656490 | 3.2 | 3,4 | 3,4 |
| 1675284 | −3.2 | 1,3 | 1,2,3,4 |
| 1718651 | −4.8 | 1,2,3 | 1,2,3 |
| 1723319 | −3.8 | 1,2,3 | 1,2,3,4 |
| 1801152 | −12.3 | 1,2,3,4 | 1,2,3,4 |
| 1809377 | 4.9 | 1,2 | 1,2 |
| 1817646 | −4.0 | 1,2 | 1,2 |
| 1845692 | −18.5 | 1,2 | 1,2,4 |
| 1880421 | −3.6 | 1,2,3 | 1,2,3 |
| 1907077 | −27.6 | 1,2,3 | 1,2,3,4 |
| 1907572 | −6.1 | 1,2,3,4 | 1,2,3,4 |
| 1962141 | −6.1 | 2,4 | 2,4 |
| 2027437 | −3.9 | 1,2,3 | 1,2,3,4 |
| 2028915 | −6.6 | 1,2,3 | 1,2,3,4 |
| 2055569 | −3.5 | 1,2 | 1,2,3,4 |
| 2057510 | −11.3 | 1,2,3,4 | 1,2,3,4 |
| 2092843 | −3.9 | 1,2,3 | 2,3 |
| 2095144 | −3.2 | 2,3 | 2,3 |
| 2126625 | −4.8 | 1,2,3,4 | 2,4 |
| 2127177 | −0.2 | 1,2,3,4 | 1,2,3,4 |
| 2152438 | 5.0 | 1,3 | 1,3 |
| 2158536 | −5.3 | 2,3,4 | 2,4 |
| 2252107 | 4.1 | 3,4 | 3,4 |
| 2270986 | 9.6 | 3,4 | 3,4 |
| 2284694 | −4.0 | 1,2,3 | 2,3 |
| 2287426 | −5.2 | 1,2,3 | 2,3 |
| 2296286 | −3.1 | 1,3 | 1,2,3 |
| 2350594 | −4.3 | 2,3 | 1,2,3,4 |
| 2359874 | 9.6 | 3,4 | 3,4 |
| 2374065 | 29.8 | 2,3,4 | 1,2 |
| 2444507 | −5.5 | 1,2,3 | 1,2,3 |
| 2508079 | −5.7 | 2,4 | 1,2,3,4 |
| 2527665 | 102 | 2,3 | 2,3 |
| 2586554 | −9.1 | 1,3 | 1,3 |
| 2599572 | −99 | 1,2,3 | 1,2,3 |
| 2622318 | −4.7 | 1,2,3,4 | 1,2,3,4 |
| 2641811 | 5.5 | 1,2,3 | 1,2,3 |
| 2723829 | −4.5 | 1,2 | 1,2,3,4 |
| 2729629 | −5.3 | 1,2,3,4 | 1,2,3,4 |
| 2769966 | −4.4 | 1,2 | 1,2,3 |
| 2833609 | −5.4 | 1,2,3 | 1,2,3,4 |
| 2862539 | 7.2 | 2,3 | 2,3 |
| 2962788 | −51.9 | 1,2,3,4 | 1,2,3,4 |
| 3116441 | −3.7 | 1,2,,3,4 | 1,2,3,4 |
| 3133891 | 9.9 | 1,2,4 | 1,2,4 |
| 3135460 | −4.5 | 1,2,3 | 1,2,3 |
| 3138721 | −6.5 | 1,2 | 1,3 |
| 3184882 | −5.5 | 1,2,3,4 | 1,2,3,4 |
| 3432534 | −11.1 | 1,2,3,4 | 1,2,3,4 |
| 3519253 | −3.3 | 1,2,3 | 1,2,3 |
| 3614617 | −7.8 | 1,2,3,4 | 1,2,3,4 |
| 3625857 | −3.9 | 1,2,3 | 1,2 |
| 3626738 | −10.9 | 1,2 | 1,2,4 |
| 3931251 | −5.0 | 1,2,3 | 1,2,3 |
| 4089291 | −6.0 | 1,2 | 1,2 |
| 4107861 | −14 | 1,2,3,4 | 1,2,3,4 |
| 4271973 | −4.0 | 1,2,3 | 1,2,3 |
| 4337383 | 4.6 | 1,2 | 2 |
| 4380064 | −48.7 | 1,2,3 | 1,2,3 |
| 4382348 | −6.1 | 1,2,3,4 | 1,2,3,4 |
| 4513549 | −4.0 | 1,2,3 | 2,3,4 |
| 5047895 | −8.1 | 2,3,4 | 1,2,3, |
| 5497369 | −4.5 | 1,2,3 | 1,2,3,4 |
| 6024084 | 23.1 | 2,3 | 2,3 |

[0189] TABLE 2

| | Differential Expression | |
|---|---|---|
| Clone ID | vs. HMEC | vs. MCF10A |
| 78313 | 5.9 | 3.3 |
| 548045 | 3.4 | 4.0 |
| 922122 | 8.6 | 5.6 |
| 1603408 | 3.2 | 3.4 |
| 1843578 | 4.6 | 4.5 |
| 1965041 | 6.0 | 3.4 |
| 2059351 | 3.7 | 3.8 |
| 2471817 | 3.3 | 4.0 |
| 2879522 | −4.2 | −3.2 |
| 2921995 | 9.1 | 4.2 |
| 3075694 | 8.7 | 4.3 |
| 494970 | 8.6 | |
| 2047549 | 5.0 | |
| 2126712 | 4.7 | |
| 3189441 | 4.7 | |
| 1679482 | 4.7 | |
| 2058594 | 4.6 | |
| 3483348 | 4.6 | |
| 169991 | 4.5 | |
| 1223877 | 4.4 | |
| 1986121 | 4.1 | |
| 2495410 | 4.0 | |
| 1331526 | 3.9 | |
| 1341670 | 3.9 | |
| 5372104 | 3.9 | |
| 44938 | 3.9 | |
| 970905 | 3.9 | |
| 1859607 | 3.8 | |
| 1378037 | 3.8 | |
| 2055762 | 3.8 | |
| 2061861 | 3.8 | |
| 1997852 | 3.7 | |
| 2046165 | 3.7 | |
| 4088394 | 3.7 | |
| 504431 | 3.7 | |
| 1573840 | 3.7 | |
| 2200842 | 3.7 | |
| 1004640 | 3.5 | |
| 188583 | 3.5 | |
| 1304365 | 3.5 | |
| 1811433 | 3.5 | |
| 2758907 | 3.5 | |
| 1838114 | 3.4 | |
| 2273944 | 3.4 | |
| 5151345 | 3.4 | |
| 1865543 | 3.3 | |
| 1824811 | 3.3 | |
| 2488567 | 3.3 | |
| 3143015 | 3.3 | |
| 892880 | 3.2 | |
| 4538603 | 3.2 | |
| 2634611 | 3.2 | |
| 678003 | −3.4 | |
| 3384076 | −3.8 | |
| 2874591 | −4.2 | |
| 954057 | | 3.8 |
| 1715374 | | 3.4 |
| 1988774 | | 3.6 |
| 2174724 | | 3.4 |
| 2472323 | | 3.2 |
| 3090127 | | 5.5 |

[0190] TABLE 3

| SEQ ID NO: | Template ID | Clone ID | Start | Stop |
|---|---|---|---|---|
| 1 | 3478236CB1 | 2350594 | 72 | 623 |
| 3 | 755197CB1 | 67577 | 105 | 388 |
| 5 | 2483854CB1 | 557538 | 905 | 1378 |
| 7 | 335942.2 | 557538 | −4 | 354 |
| 8 | 3141226CB1 | 3625857 | 725 | 1161 |
| 10 | 159262.1 | 894512 | 1 | 180 |
| 11 | 094071.15 | 1801152 | 339 | 816 |
| 12 | 1399298.1 | 2374065 | 964 | 4998 |
| 13 | 1075592.6 | 1423848 | 4204 | 4771 |
| 14 | 443762CB1 | 1237437 | 6 | 609 |
| 16 | 1256053CB1 | 2095144 | 657 | 1129 |
| 18 | 1132386.3 | 3135460 | 14 | 380 |
| 19 | 2748261CB1 | 3931251 | 257 | 612 |
| 21 | 234630.21 | 1426114 | 1 | 257 |
| 22 | 234630.58 | 1426114 | 4450 | 4637 |
| 23 | 290021.8 | 1505373 | 2024 | 2579 |
| 24 | 331749.3 | 1628341 | 264 | 748 |
| 25 | 237612.4 | 3614617 | −35 | 556 |
| 26 | 234732.41 | 2092843 | −1 | 643 |
| 27 | 234732.39 | 2092843 | 156 | 475 |
| 28 | 253903.1 | 2126625 | 1619 | 2075 |
| 29 | 203434.3 | 1962141 | 353 | 588 |
| 30 | 1382961.5 | 3184882 | 1 | 518 |
| 31 | 1382961.3 | 3184882 | 1080 | 1401 |
| 32 | 1382961.12 | 4382348 | 1408 | 1786 |
| 33 | 1382961.15 | 4382348 | 1090 | 1204 |
| 34 | 994684.9 | 3432534 | 2312 | 2868 |
| 35 | 022404.23 | 3626738 | 1339 | 1801 |
| 36 | 022404.25 | 3626738 | 3201 | 4414 |
| 37 | 243937.1 | 275384 | 821 | 1320 |
| 38 | 1382949.25 | 869890 | 1281 | 1585 |
| 39 | 243933.1 | 2641811 | 1 | 810 |
| 40 | 3355973CB1 | 4337383 | 1313 | 1540 |
| 42 | 008513.49 | 2057510 | 1721 | 2258 |
| 43 | 127987.19 | 855445 | 1057 | 1293 |
| 44 | 1397781.7 | 1522716 | 1328 | 1966 |
| 45 | 1397781.12 | 1907077 | 906 | 1569 |
| 46 | 1098479.1 | 2127177 | 3676 | 4172 |
| 47 | 1098479.5 | 2127177 | 170 | 419 |
| 48 | 3147519CB1 | 2527665 | 103 | 660 |
| 50 | 025731.1 | 2586554 | 1093 | 1355 |
| 51 | 1359783CB1 | 3138721 | 1545 | 2281 |
| 53 | 410610.1 | 2862539 | 502 | 771 |
| 54 | 1382918.40 | 1907572 | 22 | 454 |
| 55 | 3615080CB1 | 2723829 | 3663 | 4047 |
| 57 | 108089.1 | 2962788 | 1 | 295 |
| 58 | 231449.1 | 3116441 | 21 | 385 |
| 59 | 378497.1 | 5497369 | 1 | 176 |
| 60 | 220943.21 | 4089291 | 2931 | 3683 |
| 61 | 474630.29 | 1723319 | 3978 | 4495 |
| 62 | 348070.7 | 2158536 | 1359 | 1849 |
| 63 | 076047.1 | 2252107 | 1 | 392 |
| 64 | 234537.3 | 1718651 | 3060 | 3637 |
| 65 | 014284CB1 | 1817646 | 1361 | 1855 |
| 67 | 1100429.10 | 2599572 | 811 | 1389 |
| 68 | 990647.5 | 3133891 | 88 | 893 |
| 69 | 347492.1 | 6024084 | 45 | 769 |
| 70 | 2733282CB1 | 4107861 | 861 | 1267 |
| 72 | 255161.1 | 2270986 | 88 | 425 |
| 73 | 995874.18 | 797406 | 854 | 1304 |
| 73 | 995874.18 | 2444507 | 26 | 1304 |
| 74 | 3365683CB1 | 4380064 | 132 | 463 |
| 76 | 1309633.3 | 1880421 | 388 | 662 |
| 77 | 1309633.1 | 1880421 | 1868 | 2234 |
| 78 | 008514.5 | 2027437 | 541 | 777 |
| 79 | 008514.3 | 2027437 | −26 | 148 |
| 80 | 1969731CB1 | 2055569 | 700 | 2976 |
| 82 | 403676.1 | 1656490 | 1085 | 1990 |
| 83 | 234864.2 | 1675284 | 2833 | 3464 |
| 84 | 072513.1 | 2152438 | −20 | 263 |
| 85 | 1650519CB1 | 2729629 | 10 | 1477 |
| 87 | 1135936.1 | 4271973 | 661 | 1039 |
| 88 | 2481150CB1 | 5047895 | 318 | 738 |
| 90 | 1378745CB1 | 1306707 | 156 | 474 |
| 92 | 1303785CB1 | 2833609 | 109 | 594 |
| 94 | 589880CB1 | 927392 | 627 | 1314 |
| 96 | 241227.17 | 1402715 | 515 | 1496 |
| 97 | 235095.7 | 1809377 | 826 | 1247 |
| 98 | 902506.10 | 1845692 | 8282 | 8547 |
| 99 | 334103.1 | 2028915 | 554 | 1014 |
| 100 | 238396.1 | 2284694 | 434 | 1572 |
| 101 | 252493.15 | 2287426 | 3518 | 3961 |
| 102 | 481455.4 | 2296286 | 433 | 2882 |
| 103 | 475076.2 | 2359874 | 1905 | 2309 |
| 104 | 245722.8 | 2508079 | 19 | 1220 |
| 105 | 227984.1 | 2622318 | 219 | 917 |
| 106 | 245131.1 | 2769966 | 154 | 2629 |
| 107 | 010205.4 | 3519253 | 193 | 977 |
| 108 | 979243.1 | 4513549 | 299 | 1245 |
| 109 | 4322678CB1 | 44938 | 838 | 1106 |
| 111 | 256716CB1 | 169991 | 1025 | 1440 |
| 113 | 3267030CB1 | 188583 | 319 | 774 |
| 115 | 067386.1 | 494970 | 1 | 461 |
| 116 | 903446.9 | 504431 | 898 | 1547 |
| 117 | 5665139CB1 | 678003 | 2090 | 2854 |
| 119 | 154697CB1 | 892880 | 748 | 1278 |
| 121 | 2161632CB1 | 954057 | 3078 | 3462 |
| 123 | 289671.44 | 970905 | 801 | 1217 |
| 124 | 474916.2 | 1004640 | 6022 | 6989 |
| 125 | 029618.1 | 1223877 | 333 | 798 |
| 126 | 064516CB1 | 1304365 | 63 | 514 |
| 128 | 1331526CB1 | 1331526 | 1800 | 3070 |
| 130 | 209569.18 | 1341670 | 1 | 550 |
| 131 | 3752346CB1 | 1378037 | 577 | 1140 |
| 133 | 229176.4 | 1573840 | 320 | 691 |
| 134 | 229176.5 | 1573840 | 2542 | 2833 |
| 135 | 002940CB1 | 1679482 | 709 | 1223 |
| 137 | 1149046.1 | 1715374 | 412 | 1220 |
| 138 | 1750567CB1 | 1811433 | 1080 | 1596 |
| 140 | 1824950CB1 | 1824811 | 2 | 733 |
| 142 | 481114.7 | 1824811 | 165 | 716 |
| 143 | 1383937.1 | 1838114 | 3037 | 3497 |
| 144 | 1001470CB1 | 1859607 | 2101 | 2603 |
| 146 | 2666766CB1 | 1865543 | 1293 | 1728 |
| 148 | 1556751CB1 | 1986121 | 635 | 1379 |
| 150 | 2716815CB1 | 1988774 | 2579 | 2941 |
| 152 | 347975.11 | 1997852 | 2545 | 3534 |
| 153 | 1635966CB1 | 2046165 | 492 | 846 |
| 155 | 199471.2 | 2047549 | 148 | 1452 |
| 156 | 257645.8 | 2055762 | 2654 | 3098 |
| 157 | 230488.25 | 2058594 | 1009 | 1816 |
| 158 | 2083883CB1 | 2061861 | 2686 | 3264 |
| 160 | 201928.3 | 2126712 | 2952 | 3429 |
| 161 | 2746976CB1 | 2174724 | 263 | 806 |
| 163 | 369213.2 | 2200842 | 5 | 737 |
| 164 | 1330220.16 | 2273944 | 2433 | 3329 |
| 165 | 027351.2 | 2472323 | 9 | 586 |
| 166 | 337119.8 | 2488567 | 742 | 1319 |
| 167 | 235636.1 | 2495410 | 1891 | 2225 |
| 167 | 235636.1 | 3075694 | 4119 | 4578 |
| 168 | 276050.5 | 2634611 | 2736 | 3313 |
| 169 | 335367.1 | 2758907 | 344 | 980 |
| 170 | 222821.1 | 2874591 | 396 | 700 |
| 171 | 349615.7 | 3090127 | 616 | 1031 |
| 172 | 245452.1 | 3143015 | 1 | 554 |
| 173 | 346917.1 | 3189441 | 142 | 652 |
| 174 | 001929.1 | 3384076 | 797 | 1744 |
| 175 | 344785.5 | 3483348 | 1737 | 2101 |
| 176 | 201204.9 | 4088394 | 1 | 634 |
| 177 | 413720.1 | 4538603 | 1355 | 2013 |
| 178 | 217973.1 | 5151345 | 519 | 1422 |
| 179 | 337250.1 | 5372104 | 1 | 498 |
| 180 | 347699.11 | 78313 | 3980 | 4228 |
| 181 | 333919.1 | 548045 | 2071 | 2545 |
| 182 | 332919.4 | 922122 | 1262 | 1654 |
| 183 | 1420940CB1 | 1603408 | 1557 | 1775 |
| 185 | 1843578CB1 | 1843578 | 2 | 676 |
| 187 | 474679.10 | 1843578 | 109 | 606 |
| 188 | 235369.10 | 1965041 | 3846 | 4581 |
| 189 | 081056.13 | 2059351 | 424 | 1862 |
| 190 | 1399595.1 | 2471817 | 1 | 555 |
| 191 | 102245.1 | 2879522 | 209 | 464 |
| 192 | 3476619CB1 | 2921995 | 77 | 992 |
| 194 | 235636.3 | 3075694 | 13 | 350 |

[0191] TABLE 4

| | Nucleotide | | Protein |
|---|---|---|---|
| SEQ ID NO: | Template ID | SEQ ID NO: | Template ID |
| 1 | 3478236CB1 | 2 | 3478236CD1 |
| 3 | 755197CB1 | 4 | 755197CD1 |
| 5 | 2483854CB1 | 6 | 2483854CD1 |
| 8 | 3141226CB1 | 9 | 3141226CD1 |
| 14 | 443762CB1 | 15 | 443762CD1 |
| 16 | 1256053CB1 | 17 | 1256053CD1 |
| 19 | 2748261CB1 | 20 | 2748261CD1 |
| 40 | 3355973CB1 | 41 | 3355973CD1 |
| 48 | 3147519CB1 | 49 | 3147519CD1 |
| 51 | 1359783CB1 | 52 | 1359783CD1 |
| 55 | 3615080CB1 | 56 | 3615080CD1 |
| 65 | 014284CB1 | 66 | 014284CD1 |
| 70 | 2733282CB1 | 71 | 2733282CD1 |
| 74 | 3365683CB1 | 75 | 3365683CD1 |
| 80 | 1969731CB1 | 81 | 1969731CD1 |
| 85 | 1650519CB1 | 86 | 1650519CD1 |
| 88 | 2481150CB1 | 89 | 2481150CD1 |
| 90 | 1378745CB1 | 91 | 1378745CD1 |
| 92 | 1303785CB1 | 93 | 1303785CD1 |
| 94 | 589880CB1 | 95 | 589880CD1 |
| 109 | 4322678CB1 | 110 | 4322678CD1 |
| 111 | 256716CB1 | 112 | 256716CD1 |
| 113 | 3267030CB1 | 114 | 3267030CD1 |
| 117 | 5665139CB1 | 118 | 5665139CD1 |
| 119 | 154697CB1 | 120 | 154697CD1 |
| 121 | 2161632CB1 | 122 | 2161632CD1 |
| 126 | 064516CB1 | 127 | 064516CD1 |
| 128 | 1331526CB1 | 129 | 1331526CD1 |
| 131 | 3752346CB1 | 132 | 3752346CD1 |
| 135 | 002940CB1 | 136 | 002940CD1 |
| 138 | 1750567CB1 | 139 | 1750567CD1 |
| 140 | 1824950CB1 | 141 | 1824950CD1 |
| 144 | 1001470CB1 | 145 | 1001470CD1 |
| 146 | 2666766CB1 | 147 | 2666766CD1 |
| 148 | 1556751CB1 | 149 | 1556751CD1 |
| 150 | 2716815CB1 | 151 | 2716815CD1 |
| 153 | 1635966CB1 | 154 | 1635966CD1 |
| 158 | 2083883CB1 | 159 | 2083883CD1 |
| 161 | 2746976CB1 | 162 | 2746976CD1 |
| 183 | 1420940CB1 | 184 | 1420940CD1 |
| 185 | 1843578CB1 | 186 | 1843578CD1 |
| 192 | 3476619CB1 | 193 | 3476619CD1 |

[0192] TABLE 5

| SEQ ID NO | Template ID | Genbank ID | E-Value | Genbank Annotation |
|---|---|---|---|---|
| 1 | 3478236CB1 | g179039 | 0 | Human amphiregulin (AR) mRNA, complete cds, clones lambda- |
| | | | | AR1 and lambda-AR2. |
| 2 | 3478236CD1 | g179039 | 0 | Human amphiregulin (AR) mRNA, complete cds, clones lambda- |
| | | | | AR1 and lambda-AR2. |
| 3 | 755197CB1 | g2781403 | 0 | Human clone DT1P1A7 mRNA, CAG repeat region. |
| 4 | 755197CD1 | g2781403 | 0 | Human clone DT1P1A7 mRNA, CAG repeat region. |
| 5 | 2483854CB1 | g33794 | 0 | Human mRNA for interleukin-1 precursor (pre IL-1). |
| 6 | 2483854CD1 | g33794 | 0 | Human mRNA for interleukin-1 precursor (pre IL-1). |
| 7 | 335942.2 | g33794 | 0 | Human mRNA for interleukin-1 precursor (pre IL-1). |
| 8 | 3141226CB1 | g183628 | 0 | Human cytokine (GRO-beta) mRNA, complete cds. |
| 9 | 3141226CD1 | g183628 | 0 | Human cytokine (GRO-beta) mRNA, complete cds. |
| 10 | 139262.1 | g31665 | 4.00E−31 | Human hGATA3 mRNA for trans-acting T-cell specific transcription |
| | | | | factor. |
| 11 | 94071.15 | g2065174 | 0 | Human S100A2 gene, exon 1, 2 and 3. |
| 12 | 1399298.1 | g6318677 | 0 | Human ets homologous factor (EHF) mRNA, complete cds. |
| 13 | 1075592.6 | g452059 | 0 | Human insulin-like growth factor binding protein 5 (IGFBP5) |
| 14 | 443762CB1 | g183622 | 0 | Human gro (growth regulated) gene. |
| 15 | 443762CD1 | g183622 | 0 | Human gro (growth regulated) gene. |
| 16 | 1236053CB1 | g1917006 | 0 | Human Fritz mRNA, complete cds. |
| 17 | 1236053CD1 | g1917006 | 0 | Human Fritz mRNA, complete cds. |
| 18 | 1132386.3 | g6708478 | 0 | formin-like protein |
| 19 | 2748261CB1 | g2224638 | 0 | Human mRNA for KIAA0349 gene, partial cds. |
| 20 | 2748261CD1 | g2224638 | 0 | Human mRNA for KIAA0349 gene, partial cds. |
| 21 | 234630.21 | | 0 | Incyte Unique |
| 22 | 234630.58 | g29800 | 0 | Human mRNA for CD44E (epithelial form). |
| 23 | 290021.8 | g1658387 | 0 | Human p66shc (SHC) mRNA, complete cds. |
| 24 | 331749.3 | g453368 | 0 | Human maspin mRNA, complete cds. |
| 25 | 237612.4 | g30374 | 0 | Human radiated keratinocyte mRNA for cysteine protease inhibitor. |
| 26 | 234732.41 | g1160968 | 0 | Human serum amyloid A (SAA) mRNA, complete cds. |
| 27 | 234732.39 | g1160968 | 0 | Human serum amyloid A (SAA) mRNA, complete cds. |
| 28 | 253903.1 | g3033550 | 0 | Human secreted frizzled related protein mRNA, complete cds. |
| 29 | 203434.3 | g186729 | 0 | Human mesothelial keratin K7 (type II) mRNA, 3′ end. |
| 30 | 1382961.5 | g186704 | 2.00E−86 | Human 50 kDa type I epidermal keratin gene, complete cds. |
| 31 | 1382961.5 | g186704 | 0 | Human 50 kDa type I epidermal keratin gene, complete cds. |
| 32 | 1382961.12 | g30378 | 0 | Human gene for cytokeratin 17. |
| 33 | 1382961.15 | g34074 | 0 | Human mRNA for keratin-related protein. |
| 34 | 994684.9 | g186697 | 0 | Human keratin type II (58 kD) mRNA, complete cds. |
| 35 | 22404.23 | g2894518 | 0 | Human mRNA for caldesmon, 3′ UTR. |
| 36 | 22404.25 | g179829 | 0 | Human caldesmon mRNA, complete cds. |
| 37 | 243937.1 | g186690 | 0 | Human keratin 18 mRNA, complete cds. |
| 38 | 1382949.25 | g7339829 | 0 | Human keratin 18 (KRT18) gene, complete cds. |
| 39 | 243933.1 | g30310 | 0 | Human mRNA for cytokeratin 18. |
| 40 | 3355973CB1 | g400415 | 0 | Human KRT8 mRNA for keratin 8. |
| 41 | 3355973CD1 | g400415 | 0 | Human KRT8 mRNA for keratin 8. |
| 42 | 8513.49 | g908802 | 0 | Human keratin 6 isoform K6c (KRT6E) mRNA, complete cds. |
| 43 | 127987.19 | g37851 | 0 | Human vimentin gene. |
| 44 | 1397781.7 | g37851 | 0 | Human vimentin gene. |
| 45 | 139778112 | g37851 | 0 | Human vimentin gene. |
| 46 | 1098479.1 | g437971 | 0 | Human fibrillin-2 mRNA, complete cds. |
| 47 | 1098479.5 | g31399 | 0 | Human partial mRNA for fibrillin 5. |
| 48 | 3147519CB1 | g34613 | 0 | Human mRNA for matrix Gla protein. |
| 49 | 3147519CD1 | g34613 | 0 | Human mRNA for matrix Gla protein. |
| 50 | 25731.1 | | 0 | Incyte Unique |
| 51 | 1359783CB1 | g458227 | 0 | Human extracellular protein (S1-5) mRNA, complete cds. |
| 52 | 1359783CD1 | g458227 | 0 | Human extracellular protein (S1-5) mRNA, complete cds. |
| 53 | 410610.1 | g187590 | 0 | Human matrix Gla protein (MGP) gene, complete cds. |
| 54 | 1382918.4 | g31396 | 0 | Human mRNA for fibronectin (FN precursor). |
| 55 | 3615080CB1 | g2429078 | 0 | Human mRNA for Laminin-5 beta3 chain, complete cds. |
| 56 | 3615080CD1 | g2429078 | 0 | Human mRNA for Laminin-5 beta3 chain, complete eds. |
| 57 | 108089.1 | g747615 | 7.00E−68 | Human laminin S B3 chain (LAMB3) gene, exons 2-3. |
| 58 | 231449.1 | g1236320 | 0 | Human laminin gamma2 chain gene (LAMC2), exon 22′ and flanking |
| | | | | sequences. |
| 59 | 378497.1 | g2627428 | 7.00E−36 | Human laminin alpha 3b chain mRNA, partial cds. |
| 60 | 220943.21 | g31441 | 0 | Human mRNA for integrin beta 1 subunit. |
| 61 | 474630.29 | g33910 | 0 | Human mRNA for integrin beta (4) subunit. |
| 62 | 348070.7 | g2443315 | 0 | Human mRNA for squalene epoxidase, complete cds. |
| 63 | 76047.1 | g1688257 | 0 | Human collagenase and stromelysin genes, complete cds, and |
| | | | | metalloelastase gene, partial cds. |
| 64 | 234537.3 | g23896 | 0 | Human placental cDNA coding for 5′ nucleotidase (EC 3.1.3.5). |
| 65 | 014284CB1 | g1006656 | 0 | Human mRNA for cathepsin C. |
| 66 | 014284CD1 | g1006656 | 0 | Human mRNA for cathepsin C. |
| 67 | 1100429.1 | g3387920 | 0 | Human clone 24795 mRNA sequence. |
| 68 | 990647.5 | g183680 | 0 | Human glutathione transferase M3 (GSTM3) mRNA, complete cds. |
| 69 | 347492.1 | g940206 | 9.00E−45 | Human clone SS108 A10F1 hypoxanthine phosphoribosyltransferase |
| | | | | (hprt) 1200 kb deletion mutant mRNA, partial cds. |
| 70 | 2733282CB1 | g4887600 | 0 | Human mRNA for chloride channel protein, complete cds. |
| 71 | 2733282CD1 | g4887600 | 0 | Human mRNA for chloride channel protein, complete cds. |
| 72 | 255161.1 | g7959840 | 2.00E−38 | Human PRO1853 mRNA, complete cds. |
| 73 | 995874.18 | g34328 | 0 | Human mRNA for lactate dehydrogenase B (LDH-B). |
| 74 | 3365683CB1 | g34328 | 0 | Human mRNA for lactate dehydrogenase B (LDH-B). |
| 75 | 3365683CD1 | g34328 | 0 | Human mRNA for lactate dehydrogenase B (LDH-B). |
| 76 | 1309633.3 | g688010 | 0 | Human AgX-1 antigen mRNA, complete cds. |
| 77 | 1309633.1 | g688010 | 0 | Human AgX-1 antigen mRNA, complete cds. |
| 78 | 8514.5 | g179516 | 0 | Human Bullous pemphigoid autoantigen BP18O gene, 3′ end. |
| 79 | 8514.3 | | 0 | Incyte Unique |
| 80 | 1969731CB1 | g2344811 | 0 | Human mRNA for Drg1 protein. |
| 81 | 1969731CD1 | g2344811 | 0 | Human mRNA for Drg1 protein. |
| 82 | 403676.1 | g531407 | 0 | Human HCG II mRNA. |
| 83 | 234864.2 | g533956 | 5.00E−62 | Human (xs85) mRNA, 209 bp. |
| 84 | 72513.1 | g5931505 | 2.00E−56 | Human genomic DNA, chromosome 22q11.2, Cat Eye Syndrome |
| | | | | region, clone: c83F12. |
| 85 | 1650519CB1 | g3483777 | 0 | Human full length insert cDNA clone ZD79H11. |
| 86 | 1650519CD1 | g3483777 | 0 | Human full length insert cDNA clone ZD79H11. |
| 87 | 1135936.1 | g4972626 | 0 | Human caveolin 1 (CAVl) gene, exon 3 and partial cds. |
| 88 | 2481150CB1 | g4455124 | 0 | Human Sk/Dkk-1 protein precursor, mRNA, complete cds. |
| 89 | 2481150CD1 | g4455124 | 0 | Human Sk/Dkk-1 protein precursor, mRNA, complete cds. |
| 90 | 1378745CB1 | g219909 | 0 | Human mRNA for lipocortin II, complete cds. |
| 91 | 1378745CD1 | g219909 | 0 | Human mRNA for lipocortin II, complete cds, |
| 92 | 1303785CB1 | g34388 | 1.00E−145 | lipocortin (AA 1-346) [Homo sapiens] |
| 93 | 1303785CD1 | g34388 | 1.00E−145 | lipocortin (AA 1-346) [Homo sapiens] |
| 94 | 589880CB1 | g1160926 | 0 | Human cytoplasmic antiprotease 2 (CAP2) mRNA, complete cds. |
| 95 | 589880CD1 | g1160926 | 0 | Human cytoplasmic antiprotease 2 (CAP2) mRNA, complete cds. |
| 96 | 241227.17 | g7022574 | 0 | Human cDNA FLJ10500 fis, clone NT2RP2000369. |
| 97 | 235095.7 | g6576738 | 8.00E−13 | ORF2 |
| 98 | 9025061 | g31113 | 0 | Human mRNA for precursor of epidermal growth factor receptor. |
| 99 | 3341031 | g2062611 | 4.00E−06 | middle molecular weight meurofilament protein NF-M (2) |
| 100 | 238396.1 | | 0 | Incyte Unique |
| 101 | 252493.15 | g6453548 | 0 | Human mRNA; cDNA DKFZp434J0828 (from clone |
| | | | | DKFZp434J0828). |
| 102 | 481455.4 | g6807856 | 0 | Human mRNA; cDNA DKFZp761M0111 (from clone |
| | | | | DKFZp76M0111). |
| 103 | 475076.2 | g6330761 | 0 | Human mRNA for KIAA1237 protein, partial cds. |
| 104 | 245722.8 | g1694828 | 1.00E−11 | S100 calcium-binding protein A13 (S100A13) |
| 105 | 227984.1 | | 0 | Incyte Unique |
| 106 | 245131.1 | | 0 | Incyte Unique |
| 107 | 10205.4 | | 0 | Incyte Unique |
| 108 | 979243.1 | g212752 | 4.00E−61 | tensin |
| 109 | 4322678CB1 | g1633564 | 0 | C8 |
| 110 | 4322678CD1 | g1633564 | 0 | C8 |
| 111 | 256716CB1 | g1136409 | 0 | Human mRNA for KIAA0175 gene, complete cds. |
| 112 | 256716CD1 | g1136409 | 0 | Human mRNA for KIAA0175 gene, complete cds. |
| 113 | 3267030CB1 | g529172 | 0 | Human zinc finger homeodomain protein mRNA, complete eds. |
| 114 | 3267030CD1 | g529172 | 0 | Human zinc finger homeodomain protein mRNA, complete cds. |
| 115 | 67386.1 | g8489880 | 0 | Human actin binding protein anillin mRNA, complete cds. |
| 116 | 903446.9 | g3253105 | 1.00E−05 | strong similarity to the SNF2/RAD54 family of helicases; partial CDS |
| 117 | 5665139CB1 | g7023416 | 0 | Human cDNAFLJ11015 fis, clone PLACE1003302, highly similar to |
| | | | | ZINC FINGER PROTEIN 83. |
| 118 | 5665139CD1 | g7023416 | 0 | Human cDNA FLJ11015 fis, clone PLACE1003302, highly similar to |
| | | | | ZINC FINGER PROTEIN 83. |
| 119 | 154697CB1 | g186559 | 0 | Human ISG-54K gene (interferon stimulated gene) encoding a 54 |
| | | | | kDA protein, exon 2. |
| 120 | 154697CD1 | g186559 | 0 | Human ISG-54K gene (interferon stimulated gene) encoding a 54 |
| | | | | kDA protein, exon 2. |
| 121 | 2161632CB1 | g1890107 | 0 | Human lysyl oxidase-related protein (WS9-14) mRNA, complete cds. |
| 122 | 2161632CD1 | g1890107 | 0 | Human lysol oxidase-related protein (WS9-14) mRNA, complete cds. |
| 123 | 289671.44 | g303610 | 0 | Human DNA for plasma glutathione peroxidase, exon 3,4 and 5. |
| 124 | 474916.2 | g498149 | 0 | Human mRNA for KIAA0057 gene, complete cds. |
| 125 | 29618.1 | g1035638 | 2.00E−30 | Human CpG island DNA genomic MSe1 fragment, clone 7h4, |
| | | | | reverse read cpg7h4.rt1d. |
| 126 | 064516CB1 | g3511023 | 3.00E−22 | GAGE-8 |
| 127 | 064516CD1 | g3511023 | 3.00E−22 | GAGE-8 |
| 128 | 1331526CB1 | g337464 | 0 | Human transmembrane receptor (ror1) mRNA, complete cds. |
| 129 | 1331526CD1 | g337464 | 0 | Human transmembrane receptor (ror1) mRNA, complete cds. |
| 130 | 209569.18 | g535011 | 0 | Human mRNA for NADP+-dependent malic enzyme. |
| 131 | 3752346CB1 | g3334760 | 0 | Human mRNA for ribonuclease H I large subunit. |
| 132 | 3752346CD1 | g3334760 | 0 | Human mRNA for ribonuclease H I large subunit. |
| 133 | 229176.4 | g603816 | 0 | Human gene for glucosephosphate isomerase (exon 15, 16, 17 and |
| 134 | 229176.5 | g189237 | 0 | Human neuroleukin mRNA, complete cds. |
| 135 | 002940CB1 | g2306914 | 0 | Human protein kinase mRNA, complete cds. |
| 136 | 002940CD1 | g2306914 | 0 | Human protein kinase mRNA, complete eds. |
| 137 | 1149046.1 | g6137021 | 0 | Human mRNA; cDNA DKFZp566E034 (from clone |
| | | | | DKFZp566E034); complete cds. |
| 138 | 1750567CB1 | g871825 | 0 | Human recombination binding protein 1 (RBP-JK) pseudogene. |
| 139 | 1750567CD1 | g871825 | 0 | Human recombination binding protein 1 (RBP-JK) pseudogene. |
| 140 | 1824950CB1 | g30365 | 0 | Human mRNA for cystatin S. |
| 141 | 1824950CD1 | g30365 | 0 | Human mRNA for cystatin S. |
| 142 | 481114.7 | g30365 | 0 | Human mRNA for cystatin S. |
| 143 | 1383937.1 | g7243106 | 0 | Human mRNA for K1AA1363 protein, partial cds. |
| 144 | 1001470CB1 | g190031 | 0 | Human tissue-type plasminogen activator (t-PA) mRNA, complete |
| 145 | 1001470CD1 | g190031 | 0 | Human tissue-type plasminogen activator (t-PA) mRNA, complete |
| 146 | 2666766CB1 | g2565062 | 0 | Human CTG4a mRNA, complete cds. |
| 147 | 2666766CD1 | g2565062 | 0 | Human CTG4a mRNA, complete cds. |
| 148 | 1556751CB1 | g5911974 | 0 | Human mRNA; cDNA DKFZp434N161 (from clone |
| | | | | DKFZp434N161). |
| 149 | 1556751CD1 | g5911974 | 0 | Human mRNA; cDNA DKFZp434N161 (from clone |
| | | | | DKFZp434Nl61). |
| 150 | 2716815CB1 | g6807723 | 0 | Human mRNA; cDNA DKFZp434J1114 (from clone |
| | | | | DKFZp434J1114); partial cds. |
| 151 | 2716815CD1 | g6807723 | 0 | Human mRNA; cDNA DKFZp434J1114 (from clone |
| | | | | DKFZp434J1114); partial cds. |
| 152 | 347975.11 | g854169 | 0 | Human mRNA for Ndr protein kinase |
| 153 | 1635966CB1 | g6318543 | 0 | Human retinal short-chain dehydrogenase/reductase retSDR2 mRNA, |
| | | | | complete cds. |
| 154 | 1635966CD1 | g6318543 | 0 | Human retinal short-chain dehydrogenase/reductase retSDR2 mRNA, |
| | | | | complete cds. |
| 155 | 199471.2 | g2463195 | 0 | Human mRNA for MAD2 protein. |
| 156 | 257645.8 | g6808159 | 0 | Human mRNA; cDNA DKFZp761H221 (from clone |
| | | | | DKFZp761H221). |
| 157 | 230488.25 | g6995986 | 0 | Human mitochondrial carrier homolog 1 isoform a mRNA, complete |
| | | | | cds; nuclear gene for mitochondrial product. |
| 158 | 2083883CB1 | g6174679 | 0 | Human FACL5 mRNA for fatty acid CoA ligase 5, complete cds. |
| 159 | 2083883CD1 | g6174679 | 0 | Human FACL5 mRNA for fatty acid CoA ligase 5, complete cds. |
| 160 | 201928.3 | g4589928 | 0 | Human mRNA for fls353, complete eds. |
| 161 | 2746976CB1 | g3859991 | 0 | Human clone 558 unknown mRNA, complete sequence. |
| 162 | 2746976CD1 | g3859991 | 0 | Human clone 558 unknown mRNA, complete sequence. |
| 163 | 369213.2 | g6048564 | 0 | Human retinoid inducible gene 1 (RIG1) mRNA, complete cds. |
| 164 | 1330220.16 | g3287488 | 0 | Human Hsp89-alpha-delta-N mRNA, complete cds. |
| 165 | 27351.2 | g339899 | 0 | Human transposon-like element mRNA. |
| 166 | 337119.8 | g3928269 | 0 | Human mRNA for brain-derived neurotrophic factor. |
| 167 | 235636.1 | g2865218 | 0 | Human integrin binding protein Del-1 (Dell) mRNA, complete cds. |
| 168 | 276050.5 | g35482 | 0 | Human PKC alpha mRNA for protein kinase C alpha. |
| 169 | 335367.1 | g3879599 | 1.00E−15 | predicted using Genefinder |
| 170 | 222821.1 | g5912188 | 0 | Human mRNA; eDNA DKFZp564B1264 (from clone |
| | | | | DKFZp564B1264). |
| 171 | 349615.7 | g7291735 | 6.00E−46 | CG3209 gene product |
| 172 | 245452.1 | g1749801 | 0 | Human hH2B/e gene. |
| 173 | 346917.1 | g483473 | 2.00E−94 | Human mRNA for 90K product. |
| 174 | 1929.1 | g908779 | 0 | keratin type II |
| 175 | 344785.5 | g219943 | 0 | Human mRNA for nucleotide pyrophosphatase, complete cds. |
| 176 | 201204.9 | g4323527 | 0 | Human cell cycle protein CDC20 mRNA, complete cds. |
| 177 | 413720.1 | g4959382 | 6.00E−60 | env protein |
| 178 | 217973.1 | | 0 | Incyte Unique |
| 179 | 337250.1 | g4539520 | 5.00E−38 | dA22D12.1 (novel protein similar to Drosophilia Kelch (Ring Canal |
| | | | | protein, KEL) and a heterogenous set of other types of proteins) |
| 180 | 347699.11 | g238774 | 0 | UFO = proto-oncogene [Human, NIH3T3 cell, mRNA, 3116 nt]. |
| 181 | 33919.1 | | 0 | Incyte Unique |
| 182 | 332919.4 | g793840 | 0 | Human mRNA for cytokine inducible nuclear protein. |
| 183 | 1420940CB1 | g6642928 | 0 | Human 3′ phosphoadenosine 5′-phosphosulfate synthase 2b isoform |
| | | | | mRNA, complete cds. |
| 184 | 1420940CD1 | g6642928 | 0 | Human 3′ phosphoadenosine 5′-phosphosulfate synthase 2b isoform |
| | | | | mRNA, complete cds. |
| 185 | 1843578CB1 | g7020034 | 0 | Human cDNA FLJ20133 fis, clone COL06539. |
| 186 | 1843578CD1 | g7020034 | 0 | Human cDNA FLJ20133 fis, clone COL06539. |
| 187 | 474679.1 | g7582279 | 0 | Human BM-004 mRNA, complete cds. |
| 188 | 235369.1 | g3882236 | 0 | Human mRNA for KIAA0758 protein, partial cds. |
| 189 | 81056.13 | g32336 | 0 | Human hmgI mRNA for high mobility group protein I. |
| 190 | 1399595.1 | | 0 | Incyte Unique |
| 191 | 102245.1 | | 0 | Incyte Unique |
| 192 | 3476619CB1 | g179683 | 0 | Human (clone A19) C4b-binding protein beta-chain mRNA, |
| | | | | complete cds. |
| 193 | 3476619CD1 | g179683 | 0 | Human (clone A19) C4b-binding protein beta-chain mRNA, |
| | | | | complete cds. |
| 194 | 235636.3 | g2865220 | 0 | Human integrin binding protein Del-1, Z20 splice variant, (Dell) |
| | | | | mRNA, partial cds. |

[0193] TABLE 6

| SEQ ID NO | TEMPLATE ID | START | STOP | FRAME | PFAM HIT | PFAM DESCRIPTION | E-Value |
|---|---|---|---|---|---|---|---|
| 6 | 2483854CD1 | 136 | 270 | | interleukin-1 | Interleukin-1 | 5.60E−68 |
| 9 | 3141226CD1 | 35 | 101 | | IL8 | Small cytokines (intecrine/chemokine), | 1.30E−35 |
| | | | | | | interleukin-8 like | |
| 12 | 1399298.1 | 367 | 612 | forward 1 | Ets | Ets-domain | 3.30E−43 |
| 13 | 1075592.6 | 823 | 999 | forward 1 | IGFBP | Insulin-like growth factor binding proteins | 1.60E−27 |
| 13 | 1075592.6 | 1318 | 1533 | forward 1 | thyroglobulin_1 | Thyroglobulin type-1 repeat | 3.30E−36 |
| 15 | 443762CD1 | 35 | 101 | | IL8 | Small cytokines (intecrine/chemokine), | 1.80E−35 |
| | | | | | | interleukin-8 like | |
| 17 | 1256053CD1 | 35 | 148 | | Fz | Fzdomain | 1.30E−65 |
| 17 | 1256053CD1 | 189 | 295 | | NTR | NTR/C345C module | 2.1E−27 |
| 20 | 2748261CD1 | 52 | 80 | | efhand | EFhnnd | 6.90E−05 |
| 20 | 2748261CD1 | 5 | 48 | | S_100 | S-100/ICaBP type calcium binding domain | 1.80E−19 |
| 22 | 234630.58 | 214 | 480 | forward 1 | Xlink | Extracellular link domain | 3.00E−68 |
| 23 | 290021.8 | 695 | 1165 | forward 2 | PID | Phosphotyrosine interaction dom | 5.60E−56 |
| 23 | 290021.8 | 1673 | 1888 | forward 2 | SH2 | Src homology domain 2 | 2.70E−33 |
| 25 | 237612.4 | 182 | 466 | forward 2 | cystatin | Cystatin domain | 5.70E−28 |
| 26 | 234732.41 | 227 | 532 | forward 2 | SAA_proteins | Serum amyloid A protein | 4.00E−86 |
| 27 | 234732.39 | 95 | 400 | forward 2 | SAA_proteins | Serum amyloid A protein | 6.30E−87 |
| 28 | 253903.1 | 471 | 800 | forward 3 | Fz | Fz domain | 1.70E−65 |
| 29 | 203434.3 | 532 | 1143 | forward 1 | filament | Intermediate filament proteins | 9.30E−108 |
| 30 | 1382961.5 | 266 | 1036 | forward 2 | filament | Intermediate filament proteins | 1.40E−114 |
| 31 | 1382961.3 | 413 | 1348 | forward 2 | filament | Intermediate filament proteins | 2.30E−184 |
| 32 | 1382961.12 | 1517 | 1867 | forward 2 | filament | Intermediate filament proteins | 1.70E−56 |
| 33 | 1382961.15 | 350 | 1285 | forward 2 | filament | Intermediate filament proteins | 2.50E−175 |
| 34 | 994684.9 | 1870 | 2601 | forward 1 | filament | Intermediate filament proteins | 1.60E−128 |
| 34 | 994684.9 | 2628 | 2729 | forward 3 | filament | Intermediate filament proteins | 4.50E−20 |
| 34 | 994684.9 | 2534 | 2644 | forward 2 | filament | Intermediate filament proteins | 2.10E−07 |
| 36 | 22404.25 | 509 | 2122 | forward 2 | Caldesmon | Caldesmon | 0.00E+00 |
| 37 | 243937.1 | 307 | 1245 | forward 1 | filament | Intermediate filament proteins | 4.30E−157 |
| 38 | 1382949.25 | 308 | 574 | forward 2 | filament | Intermediate filament proteins | 6.40E−44 |
| 39 | 243933.1 | 3 | 728 | forward 3 | filament | Intermediate filament proteins | 4.40E−68 |
| 39 | 243933.1 | 754 | 864 | forward 1 | filament | Intermediate filament proteins | 2.70E−05 |
| 41 | 3355973CD1 | 90 | 401 | | filament | Intermediate filament proteins | 5.40E−173 |
| 42 | 8513.49 | 542 | 1483 | forward 2 | filament | Intermediate filament proteins | 7.00E−170 |
| 43 | 127987.19 | 443 | 1369 | forward 2 | filament | Intermediate filament proteins | 1.20E−174 |
| 44 | 1397781.7 | 582 | 1508 | forward 3 | filament | Intermediate filament proteins | 1.20E−174 |
| 45 | 1397781.12 | 114 | 629 | forward 3 | filament | Intermediate filament proteins | 1.00E−90 |
| 45 | 1397781.12 | 622 | 699 | forward 1 | filament | Intermediate filament proteins | 2.60E−16 |
| 46 | 1098479.1 | 6443 | 6553 | forward 2 | EGF | EGF-like domain | 2.60E−09 |
| 46 | 1098479.1 | 2784 | 2894 | forward 3 | EGF | EGF-like domain | 8.10E−08 |
| 46 | 1098479.1 | 964 | 1074 | forward 1 | EGF | EGF-like domain | 1.40E−05 |
| 46 | 1098479.1 | 5159 | 5290 | forward 2 | TB | TB domain | 5.50E−22 |
| 46 | 1098479.1 | 2937 | 3062 | forward 3 | TB | TB domain | 2.80E−18 |
| 46 | 1098479.1 | 667 | 795 | forward 1 | TB | TB domain | 2.10E−16 |
| 52 | 1359783CD1 | 177 | 212 | | EGF | EGF-like domain | 2.10E−04 |
| 54 | 1382918.4 | 364 | 603 | forward 1 | fn3 | Fibronectin type III domain | 1.90E−22 |
| 56 | 3615080CD1 | 379 | 428 | | laminin_EGF | Laminin EGF-like (Domains III an | 9.50E−18 |
| 56 | 3615080CD1 | 26 | 248 | | laminin_Nterm | Laminin N-terminal (Domain VI) | 1.50E−38 |
| 60 | 220943.21 | 225 | 1517 | forward 3 | integrin_B | Integrins, beta chain | 0.00E+00 |
| 61 | 474630.29 | 4527 | 4781 | forward 3 | fn3 | Fibronectin type III domain | 1.80E−25 |
| 61 | 474630.29 | 264 | 1520 | forward 3 | integrin_B | Integrins, beta chain | 6.3e−317 |
| 62 | 348070.7 | 632 | 1216 | forward 2 | Monooxygenase | Monooxygenase | 7.20E−05 |
| 64 | 234537.3 | 417 | 1733 | forward 3 | 5_nucleotidase | 5′-nucleotidase | 2.00E−211 |
| 64 | 234537.3 | 232 | 411 | forward 1 | 5_nucleotidase | 5′-nucleotidase | 1.40E−25 |
| 66 | 014284CD1 | 231 | 458 | | Peptidase_C1 | Papain family cysteine protease | 8.30E−106 |
| 67 | 1100429.1 | 489 | 809 | forward 3 | PDZ | PDZ domain (Also known as DHR or | 3.60E−09 |
| | | | | | | GLGF). | |
| 68 | 990647.5 | 124 | 687 | forward 1 | GST | Glutathione S-transferases. | 9.30E−67 |
| 73 | 995874.18 | 451 | 1122 | forward 1 | ldh | lactate/malate dehydrogenase | 1.60E−122 |
| 73 | 995874.18 | 204 | 464 | forward 3 | ldh | lactate/malate dehydrogenase | 5.70E−43 |
| 75 | 3365683CD1 | 23 | 332 | | ldh | lactate/malate dehydrogenase | 9.90E−177 |
| 77 | 1309633.1 | 389 | 1669 | forward 2 | UDPGP | UTP-glucose-1-phosphate uridylyltransferase | 1.70E−208 |
| 86 | 1650519CD1 | 59 | 314 | | 7tm_1 | 7 transmembrane receptor (rhodopsin family) | 6.90E−42 |
| 91 | 1378745CD1 | 107 | 174 | | annexin | Annexin | 5.60E−28 |
| 93 | 1303785CD1 | 275 | 342 | | annexin | Annexin | 1.20E−40 |
| 95 | 589880CD1 | 1 | 374 | | serpin | Serpins (serine protease inhibitors) | 1.10E−161 |
| 96 | 241227.17 | 76 | 414 | forward 1 | CUB | CUB domain | 3.00E−30 |
| 96 | 241227.17 | 745 | 1200 | forward 1 | F5_F8_type_{— C} | F5/8 type C domain | 3.80E−47 |
| 98 | 902506.1 | 916 | 1380 | forward 1 | Furin-like | Furin-like cysteine rich region | 2.00E−99 |
| 98 | 902506.1 | 2500 | 3261 | forward 1 | pkinase | Eukaryotic protein kinase domain | 9.80E−75 |
| 98 | 902506.1 | 535 | 906 | forward 1 | Recep_L_domain | Receptor L domain | 5.10E−59 |
| 104 | 245722.8 | 391 | 519 | forward 1 | S_100 | S-100/ICaBP type calcium binding domain | 2.90E−08 |
| 112 | 256716CD1 | 602 | 651 | | KA1 | Kinase associated domain 1 | 4.80E−22 |
| 112 | 256716CD1 | 11 | 263 | | pkinase | Eukaryotic protein kinase domain | 1.80E−96 |
| 114 | 3267030CD1 | 241 | 263 | | zf-C2H2 | Zinc finger, C2H2 type | 1.10E−05 |
| 118 | 5665139CD1 | 289 | 311 | | zf-C2H2 | Zinc finger, C2H2 type | 1.60E−07 |
| 122 | 2161632CD1 | 548 | 751 | | Lysyl_oxidase | Lysyl oxidase | 1.20E−144 |
| 122 | 2161632CD1 | 329 | 425 | | SRCR | Scavenger receptor cysteine-rich domain | 1.30E−29 |
| 129 | 1331526CD1 | 72 | 133 | | ig | Immunoglobulin domain | 3.60E−11 |
| 129 | 1331526CD1 | 313 | 391 | | kringle | Kringle domain | 4.60E−33 |
| 129 | 1331526CD1 | 473 | 746 | | pkinase | Eukaryotic protein kinase domain | 1.00E−68 |
| 130 | 209569.18 | 422 | 805 | forward 2 | malic | Malic enzyme | 1.00E−63 |
| 130 | 209569.18 | 121 | 441 | forward 1 | malic | Malic enzyme | 7.10E−48 |
| 132 | 3752346CD1 | 31 | 241 | | RNase_HII | Ribonuclease HII | 2.40E−67 |
| 133 | 229176.4 | 170 | 322 | forward 2 | PGI | Phosphoglucose isomerase | 3.10E−17 |
| 133 | 229176.4 | 540 | 608 | forward 3 | PGI | Phosphoglucose isomerase | 4.50E−04 |
| 134 | 229176.5 | 1606 | 2439 | forward 1 | PGI | Phosphoglucose isomerase | 2.20E−199 |
| 136 | 002940CD1 | 77 | 330 | | pkinase | Eukaryotic protein kinase domain | 4.80E−78 |
| 141 | 1824950CD1 | 32 | 137 | | cystatin | Cystatin domain | 9.40E−40 |
| 142 | 481114.7 | 167 | 484 | forward 2 | cystatin | Cystatin domain | 9.40E−40 |
| 145 | 1001470CD1 | 86 | 119 | | EGF | EGF-like domain | 2.80E−04 |
| 145 | 1001470CD1 | 41 | 78 | | fn 1 | Fibronectin type I domain | 1.10E−15 |
| 145 | 1001470CD1 | 215 | 296 | | kringle | Kringle domain | 6.50E−51 |
| 145 | 1001470CD1 | 311 | 556 | | trypsin | Trypsin | 1.90E−97 |
| 152 | 347975.11 | 545 | 1357 | forward 2 | pkinase | Eukaryotic protein kinase domain | 2.00E−62 |
| 154 | 1635966CD1 | 37 | 224 | | adh_short | short chain dehydrogenase | 2.20E−48 |
| 155 | 199471.2 | 213 | 788 | forward 3 | MAD2 | Mitotic MAD2 protein | 4.50E−156 |
| 156 | 257645.8 | 1195 | 1383 | forward 1 | LIM | LIM domain containing proteins | 4.30E−08 |
| 157 | 230488.25 | 590 | 757 | forward 2 | mito_carr | Mitochondrial carrier proteins | 1.70E−05 |
| 159 | 2083883CD1 | 163 | 629 | | AMP-binding | AMP-binding enzyme | 2.20E−13 |
| 162 | 2746976CD1 | 1 | 141 | | Clat_adaptor_s | Clathrin adaptor complex small chain | 1.80E−87 |
| 164 | 1330220.16 | 214 | 2697 | forward 1 | HSP90 | Hsp90 protein | 0.00E+00 |
| 164 | 1330220.16 | 984 | 1118 | forward 3 | HSP90 | Hsp90 protein | 2.50E−23 |
| 166 | 337119.8 | 684 | 1040 | forward 3 | NGF | Nerve growth factor family | 2.00E−88 |
| 167 | 235636.1 | 518 | 634 | forward 2 | EGF | EGF-Iike domain | 5.20E−10 |
| 167 | 235636.1 | 375 | 476 | forward 3 | EGF | EGF-like domain | 4.70E−08 |
| 167 | 235636.1 | 1250 | 1705 | forward 2 | F5_F8_type_C | FS/8 type C domain | 4.20E−79 |
| 168 | 276050.5 | 569 | 832 | forward 2 | C2 | C2 domain | 1.70E−40 |
| 168 | 276050.5 | 161 | 310 | forward 2 | DAG_PE-bind | Phorbol esters/diacylglycerol binding | 8.50E−23 |
| | | | | | | domain (C1 | |
| 168 | 276050.5 | 1067 | 1843 | forward 2 | pkinase | Eukaryotic protein kinase domain | 2.60E−77 |
| 168 | 276050.5 | 1844 | 2041 | forward 2 | pkinase_C | Protein kinase C terminal domain | 3.10E−44 |
| 172 | 245452.1 | 43 | 393 | forward 1 | histone | Core histone H2A/H2BIH3/H4 | 6.70E−54 |
| 174 | 1929.1 | 373 | 1314 | forward 1 | filament | Intermediate filament proteins | 1.60E−119 |
| 175 | 344785.5 | 587 | 1702 | forward 2 | Phosphodiest | Type I phosphodiesterase/nucleotide | 3.80E−220 |
| | | | | | | pyrophosphatase | |
| 175 | 344785.5 | 449 | 583 | forward 2 | Somatomedin_B | Somatomedin B domain | 8.90E−19 |
| 176 | 201204.9 | 381 | 497 | forward 3 | WD40 | WD domain, G-beta repeat | 1.20E−06 |
| 177 | 413720.1 | 1 | 405 | forward 1 | ENV_polyprotein | ENV polyprotein (coat polyprotein) | 3.40E−26 |
| 179 | 337250.1 | 71 | 211 | forward 2 | Keich | Kelch motif | 3.70E−18 |
| 180 | 347699.11 | 1158 | 1412 | forward 3 | fn3 | Fibronectin type III domain | 4.90E−10 |
| 180 | 347699.11 | 303 | 515 | forward 3 | ig | Immunoglobulin domain | 1.20E−07 |
| 180 | 347699.11 | 1764 | 2567 | forward 3 | pkinase | Eukaryotic protein kinase domain | 2.10E−71 |
| 182 | 332919.4 | 703 | 801 | forward 1 | ank | Ank repeat | 9.40E−08 |
| 184 | 1420940CD1 | 41 | 199 | | APS_kinase | Adenylylsulfate kinase | 4.10E−111 |
| 184 | 1420940CD1 | 284 | 617 | | ATP-sulfurylase | ATP-sulfurylase | 3.10E−203 |
| 188 | 235369.1 | 2355 | 3149 | forward 3 | 7tm_2 | 7 transmembrane receptor (Secretin family) | 2.30E−20 |
| 188 | 235369.1 | 2178 | 2336 | forward 3 | GPS | Latrophilin/CL-1-like GPS domain | 7.10E−13 |
| 188 | 235369.1 | 248 | 448 | forward 2 | ig | Immunoglobulin domain | 5.40E−06 |
| 193 | 3476619CD1 | 81 | 134 | | sushi | Sushi domain (SCR repeat) | 8.10E−14 |
| 194 | 235636.3 | 202 | 318 | forward 1 | EGF | EGF-like domain | 5.20E−10 |

[0194] TABLE 7

| | TEMPLATE | | | | |
|---|---|---|---|---|---|
| SEQ ID NO | ID | START | STOP | FRAME | DOMAIN |
| 2 | 3478236CD1 | 1 | 21 | | SP |
| 2 | 3478236CD1 | 1 | 26 | | SP |
| 2 | 3478236CD1 | 1 | 26 | | SP |
| 2 | 3478236CD1 | 191 | 217 | | SP |
| 7 | 335942.2 | 121 | 192 | forward 1 | TM |
| 7 | 335942.2 | 127 | 213 | forward 1 | TM |
| 7 | 335942.2 | 136 | 195 | forward 1 | TM |
| 9 | 3141226CD1 | 13 | 29 | | SP |
| 9 | 3141226CD1 | 14 | 32 | | SP |
| 9 | 3141226CD1 | 13 | 32 | | SP |
| 9 | 3141226CD1 | 11 | 34 | | SP |
| 9 | 3141226CD1 | 13 | 34 | | SP |
| 9 | 3141226CD1 | 1 | 34 | | SP |
| 11 | 94071.15 | 243 | 317 | forward 3 | SP |
| 11 | 94071.15 | 863 | 934 | forward 2 | SP |
| 11 | 94071.15 | 863 | 952 | forward 2 | SP |
| 12 | 1399298.1 | 2400 | 2480 | forward 3 | SP |
| 12 | 1399298.1 | 2074 | 2151 | forward 1 | TM |
| 12 | 1399298.1 | 2400 | 2468 | forward 3 | SP |
| 12 | 1399298.1 | 2072 | 2134 | forward 2 | SP |
| 12 | 1399298.1 | 3219 | 3293 | forward 3 | SP |
| 12 | 1399298.1 | 4942 | 5004 | forward 1 | TM |
| 12 | 1399298.1 | 2390 | 2458 | forward 2 | SP |
| 12 | 1399298.1 | 329 | 385 | forward 2 | SP |
| 12 | 1399298.1 | 2390 | 2452 | forward 2 | SP |
| 12 | 1399298.1 | 110 | 172 | forward 2 | TM |
| 12 | 1399298.1 | 4783 | 4857 | forward 1 | TM |
| 12 | 1399298.1 | 2400 | 2456 | forward 3 | SP |
| 12 | 1399298.1 | 4798 | 4854 | forward 1 | TM |
| 12 | 1399298.1 | 4792 | 4845 | forward 1 | TM |
| 12 | 1399298.1 | 2390 | 2461 | forward 2 | SP |
| 12 | 1399298.1 | 2400 | 2462 | forward 3 | SP |
| 13 | 1075592.6 | 763 | 843 | forward 1 | SP |
| 13 | 1075592.6 | 192 | 245 | forward 3 | TM |
| 13 | 1075592.6 | 5451 | 5507 | forward 3 | TM |
| 13 | 1075592.6 | 5430 | 5504 | forward 3 | TM |
| 13 | 1075592.6 | 168 | 227 | forward 3 | TM |
| 13 | 1075592.6 | 763 | 807 | forward 1 | SP |
| 13 | 1075592.6 | 763 | 816 | forward 1 | SP |
| 13 | 1075592.6 | 763 | 828 | forward 1 | SP |
| 13 | 1075592.6 | 763 | 822 | forward 1 | SP |
| 15 | 443762CD1 | 13 | 29 | | SP |
| 15 | 443762CD1 | 14 | 32 | | SP |
| 15 | 443762CD1 | 13 | 32 | | SP |
| 15 | 443762CD1 | 11 | 34 | | SP |
| 15 | 443762CD1 | 13 | 34 | | SP |
| 15 | 443762CD1 | 1 | 34 | | SP |
| 17 | 1256053CD1 | 9 | 23 | | SP |
| 17 | 1256053CD1 | 9 | 27 | | SP |
| 17 | 1256053CD1 | 9 | 29 | | SP |
| 17 | 1256053CD1 | 9 | 30 | | SP |
| 17 | 1256053CD1 | 9 | 32 | | SP |
| 17 | 1256053CD1 | 1 | 32 | | SP |
| 18 | 1132386.3 | 761 | 829 | forward 2 | SP |
| 18 | 1132386.3 | 231 | 302 | forward 3 | SP |
| 22 | 234630.58 | 2449 | 2523 | forward 1 | SP |
| 22 | 234630.58 | 3116 | 3166 | forward 2 | TM |
| 22 | 234630.58 | 1321 | 1383 | forward 1 | SP |
| 22 | 234630.58 | 124 | 189 | forward 1 | SP |
| 22 | 234630.58 | 3431 | 3514 | forward 2 | TM |
| 22 | 234630.58 | 1324 | 1383 | forward 1 | TM |
| 22 | 234630.58 | 1330 | 1392 | forward 1 | TM |
| 22 | 234630.58 | 1318 | 1383 | forward 1 | SP |
| 22 | 234630.58 | 1309 | 1380 | forward 1 | TM |
| 22 | 234630.58 | 1318 | 1371 | forward 1 | SP |
| 22 | 234630.58 | 1321 | 1365 | forward 1 | SP |
| 22 | 234630.58 | 1327 | 1389 | forward 1 | TM |
| 22 | 234630.58 | 1315 | 1368 | forward 1 | TM |
| 22 | 234630.58 | 124 | 183 | forward 1 | SP |
| 22 | 234630.58 | 4117 | 4170 | forward 1 | TM |
| 24 | 331749.3 | 555 | 614 | forward 3 | SP |
| 26 | 234732.41 | 173 | 238 | forward 2 | SP |
| 26 | 234732.41 | 173 | 223 | forward 2 | SP |
| 26 | 234732.41 | 173 | 232 | forward 2 | SP |
| 26 | 234732.41 | 173 | 226 | forward 2 | SP |
| 27 | 234732.39 | 35 | 100 | forward 2 | SP |
| 27 | 234732.39 | 35 | 85 | forward 2 | SP |
| 27 | 234732.39 | 35 | 94 | forward 2 | SP |
| 27 | 234732.39 | 35 | 88 | forward 2 | SP |
| 28 | 253903.1 | 4348 | 4404 | forward 1 | TM |
| 28 | 253903.1 | 4366 | 4428 | forward 1 | TM |
| 28 | 253903.1 | 303 | 392 | forward 3 | SP |
| 31 | 1382961.3 | 345 | 407 | forward 3 | TM |
| 31 | 1382961.3 | 336 | 389 | forward 3 | SP |
| 31 | 1382961.3 | 336 | 395 | forward 3 | SP |
| 31 | 1382961.3 | 351 | 404 | forward 3 | TM |
| 31 | 1382961.3 | 354 | 410 | forward 3 | TM |
| 31 | 1382961.3 | 336 | 383 | forward 3 | SP |
| 31 | 1382961.3 | 336 | 410 | forward 3 | SP |
| 31 | 1382961.3 | 336 | 422 | forward 3 | SP |
| 31 | 1382961.3 | 339 | 407 | forward 3 | TM |
| 31 | 1382961.3 | 336 | 401 | forward 3 | SP |
| 32 | 1382961.12 | 2243 | 2311 | forward 2 | SP |
| 32 | 1382961.12 | 2408 | 2473 | forward 2 | SP |
| 32 | 1382961.12 | 2243 | 2314 | forward 2 | SP |
| 32 | 1382961.12 | 2243 | 2326 | forward 2 | SP |
| 33 | 1382961.15 | 282 | 338 | forward 3 | TM |
| 33 | 1382961.15 | 265 | 330 | forward 1 | SP |
| 34 | 994684.9 | 101 | 166 | forward 2 | SP |
| 34 | 994684.9 | 101 | 172 | forward 2 | SP |
| 34 | 994684.9 | 101 | 190 | forward 2 | SP |
| 34 | 994684.9 | 2354 | 2446 | forward 2 | SP |
| 35 | 22404.23 | 890 | 952 | forward 2 | TM |
| 35 | 22404.23 | 908 | 961 | forward 2 | TM |
| 35 | 22404.23 | 826 | 882 | forward 1 | TM |
| 35 | 22404.23 | 1637 | 1717 | forward 2 | TM |
| 36 | 22404.25 | 2214 | 2258 | forward 3 | TM |
| 36 | 22404.25 | 2226 | 2294 | forward 3 | TM |
| 36 | 22404.25 | 4443 | 4496 | forward 3 | SP |
| 36 | 22404.25 | 2211 | 2273 | forward 3 | TM |
| 36 | 22404.25 | 2753 | 2815 | forward 2 | TM |
| 36 | 22404.25 | 2771 | 2824 | forward 2 | TM |
| 36 | 22404.25 | 2689 | 2745 | forward 1 | TM |
| 36 | 22404.25 | 4458 | 4511 | forward 3 | TM |
| 36 | 22404.25 | 4443 | 4502 | forward 3 | TM |
| 36 | 22404.25 | 3504 | 3584 | forward 3 | TM |
| 37 | 243937.1 | 518 | 586 | forward 2 | SP |
| 38 | 1382949.25 | 513 | 584 | forward 3 | SP |
| 42 | 8513.49 | 243 | 335 | forward 3 | SP |
| 42 | 8513.49 | 2213 | 2272 | forward 2 | SP |
| 43 | 127987.19 | 1302 | 1412 | forward 3 | SP |
| 44 | 1397781.7 | 2189 | 2254 | forward 2 | SP |
| 44 | 1397781.7 | 2207 | 2290 | forward 2 | TM |
| 44 | 1397781.7 | 1444 | 1554 | forward 1 | SP |
| 44 | 1397781.7 | 2204 | 2257 | forward 2 | TM |
| 44 | 1397781.7 | 2207 | 2263 | forward 2 | TM |
| 45 | 1397781.12 | 1690 | 1755 | forward 1 | SP |
| 45 | 1397781.12 | 930 | 989 | forward 3 | SP |
| 45 | 1397781.12 | 644 | 754 | forward 2 | SP |
| 45 | 1397781.12 | 1705 | 1758 | forward 1 | TM |
| 45 | 1397781.12 | 1708 | 1764 | forward 1 | TM |
| 46 | 1098479.1 | 4764 | 4850 | forward 3 | SP |
| 46 | 1098479.1 | 1908 | 2003 | forward 3 | SP |
| 46 | 1098479.1 | 9043 | 9114 | forward 1 | TM |
| 46 | 1098479.1 | 6174 | 6251 | forward 3 | SP |
| 46 | 1098479.1 | 5571 | 5633 | forward 3 | TM |
| 46 | 1098479.1 | 7098 | 7160 | forward 3 | SP |
| 46 | 1098479.1 | 6030 | 6125 | forward 3 | SP |
| 46 | 1098479.1 | 5592 | 5651 | forward 3 | SP |
| 46 | 1098479.1 | 9043 | 9105 | forward 1 | SP |
| 46 | 1098479.1 | 10210 | 10260 | forward 1 | TM |
| 46 | 1098479.1 | 7962 | 8042 | forward 3 | SP |
| 46 | 1098479.1 | 2328 | 2384 | forward 3 | TM |
| 46 | 1098479.1 | 6471 | 6542 | forward 3 | SP |
| 46 | 1098479.1 | 6183 | 6233 | forward 3 | SP |
| 46 | 1098479.1 | 7962 | 8036 | forward 3 | SP |
| 46 | 1098479.1 | 6477 | 6542 | forward 3 | SP |
| 46 | 1098479.1 | 3855 | 3917 | forward 3 | SP |
| 46 | 1098479.1 | 7968 | 8036 | forward 3 | SP |
| 46 | 1098479.1 | 9043 | 9090 | forward 1 | SP |
| 46 | 1098479.1 | 6054 | 6125 | forward 3 | SP |
| 46 | 1098479.1 | 9812 | 9868 | forward 2 | TM |
| 46 | 1098479.1 | 10203 | 10259 | forward 3 | TM |
| 46 | 1098479.1 | 9043 | 9099 | forward 1 | TM |
| 46 | 1098479.1 | 6168 | 6230 | forward 3 | TM |
| 46 | 1098479.1 | 10203 | 10280 | forward 3 | TM |
| 46 | 1098479.1 | 1 | 75 | forward 1 | SP |
| 46 | 1098479.1 | 9043 | 9096 | forward 1 | TM |
| 46 | 1098479.1 | 6174 | 6251 | forward 3 | SP |
| 46 | 1098479.1 | 6183 | 6251 | forward 3 | SP |
| 46 | 1098479.1 | 6183 | 6242 | forward 3 | SP |
| 46 | 1098479.1 | 1 | 69 | forward 1 | SP |
| 46 | 1098479.1 | 1 | 75 | forward 1 | SP |
| 47 | 1098479.5 | 317 | 373 | forward 2 | TM |
| 47 | 1098479.5 | 286 | 342 | forward 1 | TM |
| 49 | 3147519CD1 | 1 | 20 | | TM |
| 49 | 3147519CD1 | 5 | 20 | | TM |
| 49 | 3147519CD1 | 1 | 22 | | SP |
| 49 | 3147519CD1 | 1 | 24 | | SP |
| 49 | 3147519CD1 | 1 | 21 | | SP |
| 49 | 3147519CD1 | 1 | 16 | | SP |
| 49 | 3147519CD1 | 1 | 19 | | SP |
| 50 | 25731.1 | 281 | 334 | forward 2 | SP |
| 52 | 1359783CD1 | 1 | 17 | | SP |
| 53 | 410610.1 | 569 | 637 | forward 2 | TM |
| 53 | 410610.1 | 278 | 364 | forward 2 | SP |
| 53 | 410610.1 | 584 | 658 | forward 2 | TM |
| 54 | 1382918.4 | 404 | 475 | forward 2 | SP |
| 54 | 1382918.4 | 392 | 475 | forward 2 | SP |
| 56 | 3615080CD1 | 1 | 24 | | SP |
| 56 | 3615080CD1 | 1 | 22 | | SP |
| 56 | 3615080CD1 | 1 | 20 | | SP |
| 56 | 3615080CD1 | 1 | 17 | | SP |
| 58 | 231449.1 | 414 | 476 | forward 3 | SP |
| 60 | 220943.21 | 3318 | 3389 | forward 3 | TM |
| 60 | 220943.21 | 3314 | 3373 | forward 2 | TM |
| 60 | 220943.21 | 3299 | 3358 | forward 2 | SP |
| 60 | 220943.21 | 3299 | 3355 | forward 2 | SP |
| 60 | 220943.21 | 2316 | 2390 | forward 3 | TM |
| 60 | 220943.21 | 3299 | 3364 | forward 2 | SP |
| 60 | 220943.21 | 2343 | 2396 | forward 3 | TM |
| 60 | 220943.21 | 3319 | 3375 | forward 1 | TM |
| 60 | 220943.21 | 2340 | 2396 | forward 3 | TM |
| 60 | 220943.21 | 3313 | 3384 | forward 1 | TM |
| 60 | 220943.21 | 2313 | 2396 | forward 3 | TM |
| 60 | 220943.21 | 2310 | 2378 | forward 3 | TM |
| 61 | 474630.29 | 1927 | 1980 | forward 1 | SP |
| 61 | 474630.29 | 2295 | 2348 | forward 3 | TM |
| 61 | 474630.29 | 183 | 236 | forward 3 | SP |
| 61 | 474630.29 | 961 | 1017 | forward 1 | SP |
| 61 | 474630.29 | 2286 | 2333 | forward 3 | SP |
| 61 | 474630.29 | 2304 | 2366 | forward 3 | TM |
| 61 | 474630.29 | 2280 | 2333 | forward 3 | SP |
| 61 | 474630.29 | 2277 | 2339 | forward 3 | SP |
| 61 | 474630.29 | 2268 | 2339 | forward 3 | SP |
| 61 | 474630.29 | 2301 | 2369 | forward 3 | SP |
| 61 | 474630.29 | 2277 | 2369 | forward 3 | SP |
| 61 | 474630.29 | 156 | 236 | forward 3 | SP |
| 61 | 474630.29 | 2286 | 2342 | forward 3 | TM |
| 61 | 474630.29 | 156 | 224 | forward 3 | SP |
| 61 | 474630.29 | 156 | 236 | forward 3 | SP |
| 62 | 348070.7 | 297 | 353 | forward 3 | TM |
| 62 | 348070.7 | 306 | 359 | forward 3 | TM |
| 62 | 348070.7 | 297 | 359 | forward 3 | TM |
| 64 | 234537.3 | 2508 | 2582 | forward 3 | TM |
| 64 | 234537.3 | 1818 | 1874 | forward 3 | TM |
| 64 | 234537.3 | 2493 | 2561 | forward 3 | SP |
| 64 | 234537.3 | 2497 | 2571 | forward 1 | SP |
| 64 | 234537.3 | 2505 | 2576 | forward 3 | TM |
| 64 | 234537.3 | 2514 | 2567 | forward 3 | TM |
| 64 | 234537.3 | 2417 | 2467 | forward 2 | TM |
| 64 | 234537.3 | 157 | 222 | forward 1 | SP |
| 64 | 234537.3 | 187 | 252 | forward 1 | TM |
| 64 | 234537.3 | 2511 | 2570 | forward 3 | TM |
| 64 | 234537.3 | 157 | 234 | forward 1 | SP |
| 64 | 234537.3 | 157 | 234 | forward 1 | SP |
| 66 | 014284CD1 | 1 | 18 | | SP |
| 66 | 014284CD1 | 1 | 28 | | SP |
| 66 | 014284CD1 | 1 | 20 | | SP |
| 66 | 014284CD1 | 1 | 24 | | SP |
| 66 | 014284CD1 | 1 | 24 | | SP |
| 67 | 1100429.1 | 1107 | 1187 | forward 3 | SP |
| 68 | 990647.5 | 260 | 328 | forward 2 | SP |
| 68 | 990647.5 | 777 | 842 | forward 3 | SP |
| 71 | 2733282CD1 | 901 | 918 | | TM |
| 71 | 2733282CD1 | 904 | 922 | | TM |
| 71 | 2733282CD1 | 899 | 921 | | TM |
| 71 | 2733282CD1 | 900 | 926 | | TM |
| 73 | 995874.18 | 1203 | 1262 | forward 3 | TM |
| 73 | 995874.18 | 488 | 565 | forward 2 | SP |
| 78 | 8514.5 | 1153 | 1233 | forward 1 | SP |
| 78 | 8514.5 | 1156 | 1230 | forward 1 | SP |
| 78 | 8514.5 | 1217 | 1276 | forward 2 | SP |
| 78 | 8514.5 | 1217 | 1291 | forward 2 | SP |
| 78 | 8514.5 | 1220 | 1276 | forward 2 | SP |
| 78 | 8514.5 | 1244 | 1300 | forward 2 | TM |
| 78 | 8514.5 | 1238 | 1291 | forward 2 | TM |
| 78 | 8514.5 | 1238 | 1285 | forward 2 | SP |
| 78 | 8514.5 | 1226 | 1291 | forward 2 | SP |
| 78 | 8514.5 | 1208 | 1291 | forward 2 | SP |
| 82 | 403676.1 | 414 | 467 | forward 3 | TM |
| 82 | 403676.1 | 1871 | 1924 | forward 2 | SP |
| 82 | 403676.1 | 24 | 83 | forward 3 | TM |
| 82 | 403676.1 | 383 | 439 | forward 2 | TM |
| 82 | 403676.1 | 371 | 433 | forward 2 | TM |
| 82 | 403676.1 | 389 | 439 | forward 2 | TM |
| 83 | 234864.2 | 3070 | 3117 | forward 1 | TM |
| 86 | 1650519CD1 | 43 | 70 | | TM |
| 86 | 1650519CD1 | 45 | 65 | | TM |
| 86 | 1650519CD1 | 48 | 65 | | TM |
| 86 | 1650519CD1 | 48 | 67 | | TM |
| 86 | 1650519CD1 | 43 | 66 | | TM |
| 86 | 1650519CD1 | 46 | 68 | | TM |
| 87 | 1135936.1 | 1195 | 1248 | forward 1 | SP |
| 87 | 1135936.1 | 442 | 510 | forward 1 | SP |
| 87 | 1135936.1 | 2859 | 2921 | forward 3 | TM |
| 87 | 1135936.1 | 1192 | 1254 | forward 1 | SP |
| 87 | 1135936.1 | 1183 | 1236 | forward 1 | TM |
| 87 | 1135936.1 | 1174 | 1248 | forward 1 | SP |
| 87 | 1135936.1 | 1183 | 1248 | forward 1 | SP |
| 87 | 1135936.1 | 2713 | 2769 | forward 1 | TM |
| 87 | 1135936.1 | 1204 | 1263 | forward 1 | TM |
| 96 | 241227.17 | 4424 | 4501 | forward 2 | SP |
| 96 | 241227.17 | 5279 | 5341 | forward 2 | TM |
| 96 | 241227.17 | 5279 | 5338 | forward 2 | TM |
| 96 | 241227.17 | 1453 | 1506 | forward 1 | TM |
| 96 | 241227.17 | 3872 | 3943 | forward 2 | TM |
| 96 | 241227.17 | 4183 | 4236 | forward 1 | TM |
| 96 | 241227.17 | 215 | 268 | forward 2 | TM |
| 96 | 241227.17 | 4228 | 4287 | forward 1 | TM |
| 96 | 241227.17 | 1 | 54 | forward 1 | TM |
| 96 | 241227.17 | 4210 | 4281 | forward 1 | TM |
| 96 | 241227.17 | 4436 | 4495 | forward 2 | TM |
| 96 | 241227.17 | 2645 | 2701 | forward 2 | TM |
| 96 | 241227.17 | 1450 | 1506 | forward 1 | TM |
| 96 | 241227.17 | 4480 | 4536 | forward 1 | TM |
| 96 | 241227.17 | 1427 | 1495 | forward 2 | SP |
| 96 | 241227.17 | 5269 | 5331 | forward 1 | TM |
| 96 | 241227.17 | 1444 | 1515 | forward 1 | TM |
| 96 | 241227.17 | 3444 | 3497 | forward 3 | SP |
| 96 | 241227.17 | 2645 | 2725 | forward 2 | TM |
| 96 | 241227.17 | 4227 | 4286 | forward 3 | TM |
| 96 | 241227.17 | 1427 | 1501 | forward 2 | SP |
| 96 | 241227.17 | 2654 | 2707 | forward 2 | TM |
| 96 | 241227.17 | 4451 | 4513 | forward 2 | TM |
| 96 | 241227.17 | 3869 | 3928 | forward 2 | TM |
| 96 | 241227.17 | 1462 | 1524 | forward 1 | TM |
| 96 | 241227.17 | 1439 | 1495 | forward 2 | SP |
| 96 | 241227.17 | 1439 | 1519 | forward 2 | SP |
| 96 | 241227.17 | 1 | 75 | forward 1 | SP |
| 96 | 241227.17 | 2898 | 2960 | forward 3 | TM |
| 96 | 241227.17 | 1439 | 1498 | forward 2 | SP |
| 96 | 241227.17 | 206 | 268 | forward 2 | TM |
| 96 | 241227.17 | 4453 | 4524 | forward 1 | TM |
| 96 | 241227.17 | 5267 | 5335 | forward 2 | SP |
| 96 | 241227.17 | 4235 | 4288 | forward 2 | TM |
| 96 | 241227.17 | 4475 | 4546 | forward 2 | TM |
| 96 | 241227.17 | 4502 | 4561 | forward 2 | TM |
| 96 | 241227.17 | 4448 | 4501 | forward 2 | TM |
| 96 | 241227.17 | 1 | 51 | forward 1 | SP |
| 96 | 241227.17 | 5267 | 5329 | forward 2 | SP |
| 96 | 241227.17 | 1 | 66 | forward 1 | SP |
| 96 | 241227.17 | 1 | 54 | forward 1 | SP |
| 96 | 241227.17 | 1 | 60 | forward 1 | SP |
| 97 | 235095.7 | 933 | 995 | forward 3 | TM |
| 98 | 902506.1 | 9993 | 10055 | forward 3 | TM |
| 98 | 902506.1 | 379 | 429 | forward 1 | SP |
| 98 | 902506.1 | 9446 | 9511 | forward 2 | SP |
| 98 | 902506.1 | 9972 | 10052 | forward 3 | TM |
| 98 | 902506.1 | 2326 | 2379 | forward 1 | SP |
| 98 | 902506.1 | 2302 | 2367 | forward 1 | SP |
| 98 | 902506.1 | 2326 | 2385 | forward 1 | SP |
| 98 | 902506.1 | 379 | 459 | forward 1 | SP |
| 98 | 902506.1 | 2294 | 2374 | forward 2 | SP |
| 98 | 902506.1 | 2308 | 2382 | forward 1 | TM |
| 98 | 902506.1 | 379 | 435 | forward 1 | SP |
| 98 | 902506.1 | 379 | 444 | forward 1 | SP |
| 98 | 902506.1 | 2326 | 2373 | forward 1 | SP |
| 98 | 902506.1 | 2320 | 2385 | forward 1 | TM |
| 98 | 902506.1 | 2320 | 2379 | forward 1 | TM |
| 98 | 902506.1 | 379 | 441 | forward 1 | SP |
| 98 | 902506.1 | 379 | 450 | forward 1 | SP |
| 100 | 238396.1 | 1136 | 1213 | forward 2 | TM |
| 100 | 238396.1 | 1172 | 1225 | forward 2 | TM |
| 100 | 238396.1 | 936 | 998 | forward 3 | SP |
| 101 | 252493.15 | 902 | 958 | forward 2 | TM |
| 101 | 252493.15 | 498 | 554 | forward 3 | TM |
| 101 | 252493.15 | 498 | 551 | forward 3 | SP |
| 101 | 252493.15 | 3336 | 3398 | forward 3 | SP |
| 101 | 252493.15 | 3867 | 3917 | forward 3 | TM |
| 101 | 252493.15 | 1988 | 2068 | forward 2 | TM |
| 101 | 252493.15 | 906 | 989 | forward 3 | TM |
| 101 | 252493.15 | 2000 | 2062 | forward 2 | TM |
| 101 | 252493.15 | 498 | 545 | forward 3 | SP |
| 101 | 252493.15 | 900 | 953 | forward 3 | TM |
| 101 | 252493.15 | 1988 | 2044 | forward 2 | TM |
| 101 | 252493.15 | 498 | 560 | forward 3 | SP |
| 101 | 252493.15 | 903 | 977 | forward 3 | TM |
| 101 | 252493.15 | 909 | 968 | forward 3 | TM |
| 102 | 481455.4 | 988 | 1041 | forward 1 | TM |
| 102 | 481455.4 | 564 | 620 | forward 3 | SP |
| 102 | 481455.4 | 2454 | 2513 | forward 3 | SP |
| 102 | 481455.4 | 2412 | 2495 | forward 3 | TM |
| 102 | 481455.4 | 985 | 1041 | forward 1 | TM |
| 102 | 481455.4 | 1234 | 1287 | forward 1 | SP |
| 102 | 481455.4 | 719 | 796 | forward 2 | TM |
| 102 | 481455.4 | 280 | 333 | forward 1 | TM |
| 102 | 481455.4 | 710 | 760 | forward 2 | TM |
| 102 | 481455.4 | 2090 | 2164 | forward 2 | SP |
| 102 | 481455.4 | 2291 | 2344 | forward 2 | SP |
| 102 | 481455.4 | 713 | 769 | forward 2 | TM |
| 103 | 475076.2 | 2324 | 2401 | forward 2 | SP |
| 103 | 475076.2 | 3552 | 3605 | forward 3 | SP |
| 103 | 475076.2 | 2079 | 2135 | forward 3 | TM |
| 103 | 475076.2 | 228 | 281 | forward 3 | SP |
| 103 | 475076.2 | 4689 | 4760 | forward 3 | TM |
| 103 | 475076.2 | 284 | 337 | forward 2 | TM |
| 103 | 475076.2 | 2862 | 2918 | forward 3 | TM |
| 103 | 475076.2 | 2228 | 2314 | forward 2 | SP |
| 106 | 245131.1 | 1756 | 1818 | forward 1 | TM |
| 106 | 245131.1 | 2510 | 2569 | forward 2 | TM |
| 106 | 245131.1 | 2504 | 2560 | forward 2 | TM |
| 106 | 245131.1 | 1759 | 1818 | forward 1 | TM |
| 106 | 245131.1 | 2498 | 2569 | forward 2 | TM |
| 106 | 245131.1 | 2483 | 2569 | forward 2 | TM |
| 107 | 10205.4 | 273 | 326 | forward 3 | SP |
| 107 | 10205.4 | 273 | 350 | forward 3 | SP |
| 107 | 10205.4 | 273 | 320 | forward 3 | SP |
| 107 | 10205.4 | 1868 | 1942 | forward 2 | TM |
| 108 | 979243.1 | 1265 | 1324 | forward 2 | SP |
| 108 | 979243.1 | 1450 | 1521 | forward 1 | SP |
| 108 | 979243.1 | 1450 | 1521 | forward 1 | SP |
| 114 | 3267030CD1 | 796 | 819 | | TM |
| 115 | 67386.1 | 186 | 269 | forward 3 | SP |
| 122 | 2161632CD1 | 1 | 21 | | SP |
| 122 | 2161632CD1 | 1 | 27 | | SP |
| 122 | 2161632CD1 | 1 | 25 | | SP |
| 123 | 289671.44 | 80 | 166 | forward 2 | SP |
| 123 | 289671.44 | 95 | 166 | forward 2 | SP |
| 123 | 289671.44 | 95 | 157 | forward 2 | SP |
| 123 | 289671.44 | 95 | 166 | forward 2 | SP |
| 124 | 474916.2 | 197 | 274 | forward 2 | TM |
| 124 | 474916.2 | 1539 | 1589 | forward 3 | TM |
| 124 | 474916.2 | 4444 | 4518 | forward 1 | SP |
| 124 | 474916.2 | 980 | 1042 | forward 2 | SP |
| 124 | 474916.2 | 1527 | 1595 | forward 3 | TM |
| 124 | 474916.2 | 837 | 923 | forward 3 | SP |
| 124 | 474916.2 | 4124 | 4192 | forward 2 | SP |
| 124 | 474916.2 | 4124 | 4183 | forward 2 | SP |
| 124 | 474916.2 | 6317 | 6379 | forward 2 | TM |
| 124 | 474916.2 | 6296 | 6352 | forward 2 | TM |
| 124 | 474916.2 | 5719 | 5778 | forward 1 | TM |
| 124 | 474916.2 | 2933 | 2989 | forward 2 | TM |
| 124 | 474916.2 | 4444 | 4506 | forward 1 | SP |
| 124 | 474916.2 | 4121 | 4177 | forward 2 | TM |
| 124 | 474916.2 | 837 | 908 | forward 3 | SP |
| 124 | 474916.2 | 2933 | 2995 | forward 2 | TM |
| 124 | 474916.2 | 4133 | 4204 | forward 2 | TM |
| 124 | 474916.2 | 4124 | 4180 | forward 2 | SP |
| 124 | 474916.2 | 4133 | 4183 | forward 2 | TM |
| 124 | 474916.2 | 344 | 400 | forward 2 | TM |
| 124 | 474916.2 | 887 | 940 | forward 2 | SP |
| 124 | 474916.2 | 875 | 931 | forward 2 | TM |
| 124 | 474916.2 | 4444 | 4512 | forward 1 | SP |
| 124 | 474916.2 | 5539 | 5589 | forward 1 | TM |
| 124 | 474916.2 | 837 | 902 | forward 3 | SP |
| 124 | 474916.2 | 1527 | 1583 | forward 3 | SP |
| 124 | 474916.2 | 1527 | 1610 | forward 3 | SP |
| 124 | 474916.2 | 1527 | 1598 | forward 3 | SP |
| 124 | 474916.2 | 1527 | 1595 | forward 3 | SP |
| 124 | 474916.2 | 1572 | 1631 | forward 3 | TM |
| 124 | 474916.2 | 1527 | 1589 | forward 3 | SP |
| 125 | 29618.1 | 573 | 635 | forward 3 | SP |
| 129 | 1331526CD1 | 402 | 429 | | SP |
| 129 | 1331526CD1 | 405 | 424 | | TM |
| 129 | 1331526CD1 | 402 | 419 | | SP |
| 129 | 1331526CD1 | 402 | 417 | | SP |
| 129 | 1331526CD1 | 11 | 29 | | SP |
| 129 | 1331526CD1 | 9 | 28 | | SP |
| 129 | 1331526CD1 | 400 | 423 | | TM |
| 129 | 1331526CD1 | 6 | 28 | | SP |
| 129 | 1331526CD1 | 5 | 29 | | SP |
| 129 | 1331526CD1 | 1 | 29 | | SP |
| 134 | 229176.5 | 898 | 951 | forward 1 | TM |
| 134 | 229176.5 | 1377 | 1421 | forward 3 | SP |
| 134 | 229176.5 | 1277 | 1321 | forward 2 | SP |
| 137 | 1149046.1 | 1534 | 1596 | forward 1 | TM |
| 137 | 1149046.1 | 1558 | 1626 | forward 1 | TM |
| 137 | 1149046.1 | 1598 | 1669 | forward 2 | TM |
| 137 | 1149046.1 | 1531 | 1581 | forward 1 | TM |
| 137 | 1149046.1 | 1598 | 1663 | forward 2 | SP |
| 137 | 1149046.1 | 2495 | 2572 | forward 2 | TM |
| 137 | 1149046.1 | 1534 | 1593 | forward 1 | TM |
| 137 | 1149046.1 | 1583 | 1639 | forward 2 | TM |
| 141 | 1824950CD1 | 1 | 28 | | SP |
| 141 | 1824950CD1 | 4 | 20 | | SP |
| 141 | 1824950CD1 | 1 | 24 | | SP |
| 141 | 1824950CD1 | 1 | 22 | | SP |
| 141 | 1824950CD1 | 1 | 18 | | SP |
| 141 | 1824950CD1 | 1 | 20 | | SP |
| 142 | 481114.7 | 74 | 157 | forward 2 | SP |
| 142 | 481114.7 | 83 | 133 | forward 2 | SP |
| 142 | 481114.7 | 74 | 145 | forward 2 | SP |
| 142 | 481114.7 | 74 | 139 | forward 2 | SP |
| 142 | 481114.7 | 74 | 127 | forward 2 | SP |
| 142 | 481114.7 | 74 | 133 | forward 2 | SP |
| 143 | 1383937.1 | 208 | 273 | forward 1 | SP |
| 143 | 1383937.1 | 3812 | 3862 | forward 2 | SP |
| 143 | 1383937.1 | 2434 | 2505 | forward 1 | TM |
| 143 | 1383937.1 | 2110 | 2181 | forward 1 | SP |
| 143 | 1383937.1 | 208 | 261 | forward 1 | SP |
| 143 | 1383937.1 | 3806 | 3868 | forward 2 | TM |
| 143 | 1383937.1 | 208 | 270 | forward 1 | SP |
| 143 | 1383937.1 | 2110 | 2181 | forward 1 | SP |
| 143 | 1383937.1 | 3803 | 3877 | forward 2 | TM |
| 143 | 1383937.1 | 3809 | 3865 | forward 2 | TM |
| 143 | 1383937.1 | 3812 | 3868 | forward 2 | SP |
| 143 | 1383937.1 | 3367 | 3435 | forward 1 | SP |
| 143 | 1383937.1 | 3812 | 3865 | forward 2 | TM |
| 143 | 1383937.1 | 208 | 258 | forward 1 | SP |
| 145 | 1001470CD1 | 4 | 22 | | SP |
| 145 | 1001470CD1 | 4 | 19 | | SP |
| 145 | 1001470CD1 | 1 | 23 | | SP |
| 145 | 1001470CD1 | 4 | 23 | | SP |
| 145 | 1001470CD1 | 1 | 28 | | SP |
| 145 | 1001470CD1 | 1 | 25 | | SP |
| 147 | 2666766CD1 | 7 | 27 | | SP |
| 147 | 2666766CD1 | 9 | 27 | | SP |
| 147 | 2666766CD1 | 9 | 31 | | SP |
| 147 | 2666766CD1 | 4 | 27 | | SP |
| 147 | 2666766CD1 | 1 | 29 | | SP |
| 152 | 347975.11 | 2788 | 2844 | forward 1 | TM |
| 152 | 347975.11 | 2755 | 2826 | forward 1 | TM |
| 152 | 347975.11 | 2764 | 2826 | forward 1 | TM |
| 154 | 1635966CD1 | 1 | 19 | | TM |
| 154 | 1635966CD1 | 8 | 27 | | TM |
| 154 | 1635966CD1 | 1 | 24 | | SP |
| 154 | 1635966CD1 | 1 | 17 | | SP |
| 154 | 1635966CD1 | 1 | 20 | | SP |
| 154 | 1635966CD1 | 1 | 23 | | SP |
| 154 | 1635966CD1 | 1 | 18 | | SP |
| 155 | 199471.2 | 1336 | 1413 | forward 1 | TM |
| 156 | 257645.8 | 3928 | 3978 | forward 1 | TM |
| 156 | 257645.8 | 1827 | 1907 | forward 3 | SP |
| 156 | 257645.8 | 3014 | 3085 | forward 2 | TM |
| 157 | 230488.25 | 866 | 925 | forward 2 | TM |
| 157 | 230488.25 | 1805 | 1855 | forward 2 | SP |
| 157 | 230488.25 | 1672 | 1740 | forward 1 | SP |
| 159 | 2083883CD1 | 50 | 68 | | TM |
| 159 | 2083883CD1 | 74 | 93 | | TM |
| 159 | 2083883CD1 | 57 | 80 | | TM |
| 164 | 1330220.16 | 970 | 1053 | forward 1 | SP |
| 164 | 1330220.16 | 2624 | 2677 | forward 2 | SP |
| 164 | 1330220.16 | 2603 | 2662 | forward 2 | TM |
| 164 | 1330220.16 | 557 | 610 | forward 2 | TM |
| 164 | 1330220.16 | 4702 | 4788 | forward 1 | SP |
| 164 | 1330220.16 | 976 | 1029 | forward 1 | TM |
| 164 | 1330220.16 | 2618 | 2677 | forward 2 | SP |
| 164 | 1330220.16 | 970 | 1053 | forward 1 | SP |
| 164 | 1330220.16 | 3609 | 3677 | forward 3 | SP |
| 164 | 1330220.16 | 551 | 607 | forward 2 | TM |
| 165 | 27351.2 | 94 | 141 | forward 1 | SP |
| 165 | 27351.2 | 94 | 147 | forward 1 | SP |
| 165 | 27351.2 | 88 | 171 | forward 1 | SP |
| 165 | 27351.2 | 94 | 165 | forward 1 | SP |
| 165 | 27351.2 | 94 | 156 | forward 1 | SP |
| 165 | 27351.2 | 94 | 165 | forward 1 | SP |
| 167 | 235636.1 | 3401 | 3457 | forward 2 | TM |
| 167 | 235636.1 | 2173 | 2247 | forward 1 | SP |
| 167 | 235636.1 | 3884 | 3946 | forward 2 | TM |
| 167 | 235636.1 | 2623 | 2682 | forward 1 | TM |
| 167 | 235636.1 | 2325 | 2396 | forward 3 | TM |
| 167 | 235636.1 | 702 | 755 | forward 3 | SP |
| 167 | 235636.1 | 2702 | 2779 | forward 2 | TM |
| 167 | 235636.1 | 2340 | 2393 | forward 3 | SP |
| 167 | 235636.1 | 3743 | 3829 | forward 2 | TM |
| 167 | 235636.1 | 3884 | 3952 | forward 2 | SP |
| 167 | 235636.1 | 2279 | 2332 | forward 2 | TM |
| 167 | 235636.1 | 2334 | 2399 | forward 3 | TM |
| 167 | 235636.1 | 315 | 368 | forward 3 | SP |
| 167 | 235636.1 | 3170 | 3223 | forward 2 | SP |
| 167 | 235636.1 | 315 | 377 | forward 3 | SP |
| 167 | 235636.1 | 2295 | 2378 | forward 3 | TM |
| 167 | 235636.1 | 2337 | 2396 | forward 3 | TM |
| 167 | 235636.1 | 315 | 383 | forward 3 | SP |
| 167 | 235636.1 | 315 | 362 | forward 3 | SP |
| 168 | 276050.5 | 3675 | 3749 | forward 3 | TM |
| 168 | 276050.5 | 3723 | 3788 | forward 3 | SP |
| 170 | 222821.1 | 426 | 482 | forward 3 | SP |
| 170 | 222821.1 | 195 | 275 | forward 3 | TM |
| 171 | 349615.7 | 596 | 655 | forward 2 | TM |
| 171 | 349615.7 | 589 | 657 | forward 1 | SP |
| 171 | 349615.7 | 45 | 119 | forward 3 | TM |
| 171 | 349615.7 | 591 | 671 | forward 3 | TM |
| 171 | 349615.7 | 585 | 644 | forward 3 | SP |
| 171 | 349615.7 | 372 | 431 | forward 3 | SP |
| 171 | 349615.7 | 550 | 663 | forward 1 | SP |
| 171 | 349615.7 | 601 | 675 | forward 1 | TM |
| 171 | 349615.7 | 585 | 638 | forward 3 | TM |
| 171 | 349615.7 | 613 | 675 | forward 1 | TM |
| 171 | 349615.7 | 372 | 425 | forward 3 | SP |
| 171 | 349615.7 | 591 | 650 | forward 3 | TM |
| 171 | 349615.7 | 590 | 643 | forward 2 | SP |
| 171 | 349615.7 | 601 | 660 | forward 1 | TM |
| 171 | 349615.7 | 586 | 636 | forward 1 | TM |
| 172 | 245452.1 | 522 | 590 | forward 3 | TM |
| 173 | 346917.1 | 129 | 212 | forward 3 | SP |
| 173 | 346917.1 | 129 | 182 | forward 3 | SP |
| 173 | 346917.1 | 129 | 191 | forward 3 | SP |
| 173 | 346917.1 | 129 | 194 | forward 3 | SP |
| 174 | 1929.1 | 1728 | 1802 | forward 3 | SP |
| 174 | 1929.1 | 1499 | 1549 | forward 2 | SP |
| 175 | 344785.5 | 239 | 292 | forward 2 | SP |
| 175 | 344785.5 | 2382 | 2447 | forward 3 | SP |
| 175 | 344785.5 | 254 | 307 | forward 2 | TM |
| 175 | 344785.5 | 3556 | 3627 | forward 1 | SP |
| 175 | 344785.5 | 245 | 301 | forward 2 | TM |
| 176 | 201204.9 | 258 | 317 | forward 3 | SP |
| 177 | 413720.1 | 1912 | 1968 | forward 1 | TM |
| 177 | 413720.1 | 1336 | 1392 | forward 1 | TM |
| 179 | 337250.1 | 1179 | 1241 | forward 3 | TM |
| 180 | 347699.11 | 3656 | 3712 | forward 2 | TM |
| 180 | 347699.11 | 4460 | 4531 | forward 2 | TM |
| 180 | 347699.11 | 1503 | 1571 | forward 3 | TM |
| 180 | 347699.11 | 180 | 236 | forward 3 | SP |
| 180 | 347699.11 | 1515 | 1568 | forward 3 | TM |
| 180 | 347699.11 | 1509 | 1574 | forward 3 | TM |
| 180 | 347699.11 | 1509 | 1568 | forward 3 | TM |
| 180 | 347699.11 | 159 | 254 | forward 3 | SP |
| 180 | 347699.11 | 1512 | 1574 | forward 3 | TM |
| 180 | 347699.11 | 180 | 254 | forward 3 | SP |
| 181 | 333919.1 | 2915 | 2980 | forward 2 | SP |
| 181 | 333919.1 | 1416 | 1496 | forward 3 | SP |
| 181 | 333919.1 | 2912 | 2968 | forward 2 | TM |
| 181 | 333919.1 | 1416 | 1490 | forward 3 | SP |
| 182 | 332919.4 | 1294 | 1347 | forward 1 | TM |
| 187 | 474679.1 | 360 | 416 | forward 3 | TM |
| 187 | 474679.1 | 351 | 431 | forward 3 | SP |
| 188 | 235369.1 | 4479 | 4556 | forward 3 | TM |
| 188 | 235369.1 | 2382 | 2498 | forward 3 | SP |
| 188 | 235369.1 | 4478 | 4552 | forward 2 | TM |
| 188 | 235369.1 | 2907 | 2987 | forward 3 | TM |
| 188 | 235369.1 | 3048 | 3113 | forward 3 | TM |
| 188 | 235369.1 | 2547 | 2618 | forward 3 | TM |
| 188 | 235369.1 | 1273 | 1356 | forward 1 | SP |
| 188 | 235369.1 | 1675 | 1734 | forward 1 | SP |
| 188 | 235369.1 | 4515 | 4577 | forward 3 | TM |
| 188 | 235369.1 | 4481 | 4537 | forward 2 | TM |
| 188 | 235369.1 | 4463 | 4534 | forward 2 | TM |
| 188 | 235369.1 | 2907 | 2966 | forward 3 | TM |
| 188 | 235369.1 | 1675 | 1740 | forward 1 | SP |
| 188 | 235369.1 | 4479 | 4550 | forward 3 | SP |
| 188 | 235369.1 | 4487 | 4537 | forward 2 | TM |
| 188 | 235369.1 | 2907 | 2975 | forward 3 | TM |
| 188 | 235369.1 | 2685 | 2741 | forward 3 | TM |
| 188 | 235369.1 | 4497 | 4544 | forward 3 | SP |
| 188 | 235369.1 | 3123 | 3191 | forward 3 | TM |
| 188 | 235369.1 | 4524 | 4577 | forward 3 | TM |
| 188 | 235369.1 | 2922 | 2975 | forward 3 | TM |
| 188 | 235369.1 | 4488 | 4550 | forward 3 | SP |
| 188 | 235369.1 | 4470 | 4550 | forward 3 | SP |
| 188 | 235369.1 | 4491 | 4556 | forward 3 | TM |
| 188 | 235369.1 | 4494 | 4550 | forward 3 | SP |
| 188 | 235369.1 | 2907 | 2969 | forward 3 | TM |
| 188 | 235369.1 | 4485 | 4550 | forward 3 | SP |
| 188 | 235369.1 | 2907 | 2978 | forward 3 | TM |
| 188 | 235369.1 | 4497 | 4556 | forward 3 | TM |
| 193 | 3476619CD1 | 1 | 20 | | SP |
| 194 | 235636.3 | 155 | 244 | forward 2 | SP |
| 194 | 235636.3 | 1 | 54 | forward 1 | SP |
| 194 | 235636.3 | 1 | 63 | forward 1 | SP |
| 194 | 235636.3 | 1 | 69 | forward 1 | SP |
| 194 | 235636.3 | 1 | 48 | forward 1 | SP |

What is claimed is:

1. A combination comprising a plurality of cDNAs that are differentially expressed in breast cancer and selected from SEQ ID NOs:1, 3, 5, 7, 8, 10-14, 16, 18, 19, 21-40, 42-48, 50, 51, 53-55, 57-65, 67-70, 72-74, 76-80, 82-85, 87, 88, 90, 92, 94, 96-109, 111, 113, 115, 116, 117, 119, 121, 123-126, 128, 130, 131, 133, 134, 135, 137, 138, 140, 142-144, 146, 148, 150, 152, 153, 155-158, 160, 161, 163-183, 185, 187-192, and 194 or their complements.

2. The combination of claim 1, comprising a plurality of cDNAs that are differentially expressed in metastatic breast cancer and selected from SEQ ID NOs:109, 111, 113, 115, 116, 117, 119, 121, 123-126, 128, 130, 131, 133, 134, 135, 137, 138, 140, 142-144, 146, 148, 150, 152, 153, 155-158, 160, 161, 163-183, 185, 187-192, and 194 or their complements.

3. The combination of claim 1, wherein the cDNAs are immobilized on a substrate.

4. A high throughput method for detecting differential expression of one or more cDNAs in a sample containing nucleic acids, the method comprising:
(a) hybridizing the substrate of claim 3 with nucleic acids of the sample, thereby forming one or more hybridization complexes;
(b) detecting the hybridization complexes; and
(c) comparing the hybridization complexes with those of a standard, wherein differences between the standard and sample hybridization complexes indicate differential expression of cDNAs in the sample.

5. The method of claim 4, where in the nucleic acids of the sample are amplified prior to hybridization.

6. The method of claim 4, wherein the sample is from a subject with breast cancer and comparison with a standard defines a stage of that disease.

7. A high throughput method of screening a plurality of molecules or compounds to identify a ligand which specifically binds a cDNA, the method comprising:
(a) combining the combination of claim 1 with the plurality of molecules or compounds under conditions to allow specific binding; and
(b) detecting specific binding between each cDNA and at least one molecule or compound, thereby identifying a ligand that specifically binds to each cDNA.

8. The method of claim 7 wherein the plurality of molecules or compounds are selected from DNA molecules, RNA molecules, peptide nucleic acid molecules, mimetics, peptides, transcription factors, repressors, and regulatory proteins.

9. An isolated cDNA selected from SEQ ID NOs:21, 50, 79, 100, 105, 106, 107, 109, 126, 178, 181, 190, and 191.

10. A vector containing the cDNA of claim 9.

11. A host cell containing the vector of claim 10.

12. A method for producing a protein, the method comprising the steps of:
(a) culturing the host cell of claim 11 under conditions for expression of protein; and
(b) recovering the protein from the host cell culture.

13. A protein or a portion thereof produced by the method of claim 12.

14. A high-throughput method for using a protein to screen a plurality of molecules or compounds to identify at least one ligand which specifically binds the protein, the method comprising:
(a) combining the protein of claim 13 with the plurality of molecules or compounds under conditions to allow specific binding; and
(b) detecting specific binding between the protein and a molecule or compound, thereby identifying a ligand which specifically binds the protein.

15. The method of claim 14 wherein the plurality of molecules or compounds is selected from DNA molecules, RNA molecules, peptide nucleic acid molecules, mimetics, peptides, proteins, agonists, antagonists, antibodies or their fragments, immunoglobulins, inhibitors, drug compounds, and pharmaceutical agents.

16. A method of using a protein to produce a polyclonal antibody, the method comprising:
a) immunizing an animal with the protein of claim 13 under conditions to elicit an antibody response;
b) isolating animal antibodies; and
c) screening the isolated antibodies with the protein, thereby identifying an antibody which specifically binds the protein.

17. A method of using a protein to prepare a monoclonal antibody comprising:
a) immunizing a animal with a protein of claim 1 under conditions to elicit an antibody response;
b) isolating antibody producing cells from the animal;
c) fusing the antibody producing cells with immortalized cells in culture to form monoclonal antibody producing hybridoma cells;
d) culturing the hybridoma cells; and
e) isolating from culture monoclonal antibodies which specifically bind the protein.

18. A method of purifying an antibody from a sample, the method comprising:
a) combining the protein of claim 13 with a sample under conditions to allow specific binding;
b) recovering the bound protein; and
c) separating the protein from the antibody, thereby obtaining purified antibody.

19. A purified antibody which specifically binds a protein differentially expressed in breast cancer.

20. A method for using an antibody to detect expression of a protein in a sample, the method comprising:
a) combining the antibody of claim 19 with a sample under conditions which allow the formation of antibody:protein complexes; and
b) detecting complex formation, wherein complex formation indicates expression of the protein in the sample.

The application's sequence listing, which the Patent Office published only in electronic form, follows.

SEQUENCE LISTING (194 sequences)

SEQ ID NO: 1 - DNA, 1278 bp, Homo sapiens
  misc_feature: Incyte ID No: 3478236CB1
aagagcttatgacgttcgcatgcaacgcgtacgtaagcctcggaattccggcttggaggccacacctgggtgccagcgccccagaggtcccgggacagcccgaggcgccgcgcccgccgccccgagctccccaagccttcgagagcggcgcacactcccggtctccactcgctcttccaacacccgctcgttttggcggcagctcgtgtcccagagaccgagttgccccagagaccgagacgccgccgctgcgaaggaccaatgagagccccgctgctaccgccggcgccggtggtgctgtcgctcttgatactcggctcaggccattatgctgctggattggacctcaatgacacctactctgggaagcgtgaaccattttctggggaccacagtgctgatggatttgaggttacctcaagaagtgagatgtcttcagggagtgagatttcccctgtgagtgaaatgccttctagtagtgaaccgtcctcgggagccgactatgactactcagaagagtatgataacgaaccacaaatacctggctatattgtcgatgattcagtcagagttgaacaggtagttaagcccccccaaaacaagacggaaagtgaaaatacttcagataaacccaaaagaaagaaaaagggaggcaaaaatggaaaaaatagaagaaacagaaagaagaaaaatccatgtaatgcagaatttcaaaatttctgcattcacggagaatgcaaatatatagagcacctggaagcagtaacatgcaaatgtcagcaagaatatttcggtgaacggtgtggggaaaagtccatgaaaactcacagcatgattgacagtagtttatcaaaaattgcattagcagccatagctgcctttatgtctgctgtgatcctcacagctgttgctgttattacagtccagcttagaagacaatacgtcaggaaatatgaaggagaagctgaggaacgaaagaaacttcgacaagagaatggaaatgtacatgctatagcataactgaagataaaattacaggatatcacattggagtcactgccaagtcatagccataaatgatgagtcggtcctctttccagtggatcataagacaatggaccctttttgttatgatggttttaaactttcaattgtcactttttatgctatttctgtatataaaggtgcacgaaggtaaaaagtattttttcaagttgtaaataatttatttaatatttaatggaagtgtatttattttacagctcattaaactttttt

SEQ ID NO: 2 - protein, 252 aa, Homo sapiens
  misc_feature: Incyte ID No: 3478236CD1
MRAPLLPPAPVVLSLLILGSGHYAAGLDLNDTYSGKREPFSGDHSADGFEVTSRSEMSSGSEISPVSEMPSSSEPSSGADYDYSEEYDNEPQIPGYIVDDSVRVEQVVKPPQNKTESENTSDKPKRKKKGGKNGKNRRNRKKKNPCNAEFQNFCIHGECKYIEHLEAVTCKCQQEYFGERCGEKSMKTHSMIDSSLSKIALAAIAAFMSAVILTAVAVITVQLRRQYVRKYEGEAEERKKLRQENGNVHAIA

SEQ ID NO: 3 - DNA, 1080 bp, Homo sapiens
  misc_feature: Incyte ID No: 755197CB1
cggctcgagcttttgtcctggggtgagagggtgacgcatgtgccctctggcagtctgctgctgtgtccagagtccgactccagctgggctgtaactgggcttggcccccgccttaggccccgccagcaggcgaagcagggagatgtcagactgctacacggagctggagaaggcagtcattgtcctggtggaaaacttctacaaatatgtgtctaagtacagcctggtcaagaacaagatcagcaagagcagcttccgcgagatgctccagaaagagctgaaccacatgctgtcggacacagggaaccggaaggctgcggataagctcatccagaacctggatgccaatcatgatgggcgcatcagcttcgatgagtactggaccttgataggcggcatcaccggccccatcgccaaactcatccatgagcaggagcagcagagcagcagctagagacccctttggccacaccttccaggcactggcctgatgccccgccctggtgctctccccaggctccctcctcagcctcctgcccacccagggccctttactctcttctccctccagaccttcctctgacccttgctgaactggggtccctttgtgagtgtctcagtctagaggtacctccctccctggggggtctcagctcctggagtcgcaggcccttggggcccctctgtgagatctcaatgctgtctggggaccctaagagttttctcacctgttcagtctcatctaaccttccaatgtctgatgttcctgccaaattcctgcctgattctgggtccgtcctgacctccaaaggtcagcttggtgcttgaggtctccctgctcttggtggcagtggtagcagcaacagcagcagcagcagcagcagcagcagcagagacctctccactttcccttagcccctctgctgggtagagaggcactttcagggacttccctccagctgcctcttcatctgggaatgagctaagcaaggctgagcctcctcctgttgcttgaaataatgatgatataaaggctggatttggagtttgtatcccctggtccctctgggatgctcatta

SEQ ID NO: 4 - protein, 103 aa, Homo sapiens
  misc_feature: Incyte ID No: 755197CD1
MSDCYTELEKAVIVLVENFYKYVSKYSLVKNKISKSSFREMLQKELNHMLSDTGNRKAADKLIQNLDANHDGRISFDEYWTLIGGITGPIAKLIHEQEQQSSS

SEQ ID NO: 5 - DNA, 1667 bp, Homo sapiens
  misc_feature: Incyte ID No: 2483854CB1
gtcatttcattggcgtttgagtcagcaaagaagtcaagatggccaaagttccagacatgtttgaagacctgaagaactgttacagtgaaaatgaagaagacagttcctccattgatcatctgtctctgaatcagaaatccttctatcatgtaagctatggcccactccatgaaggctgcatggatcaatctgtgtctctgagtatctctgaaacctctaaaacatccaagcttaccttcaaggagagcatggtggtagtagcaaccaacgggaaggttctgaagaagagacggttgagtttaagccaatccatcactgatgatgacctggaggccatcgccaatgactcagaggaagaaatcatcaagcctaggtcagcaccttttagcttcctgagcaatgtgaaatacaactttatgaggatcatcaaatacgaattcatcctgaatgacgccctcaatcaaagtataattcgagccaatgatcagtacctcacggctgctgcattacataatctggatgaagcagtgaaatttgacatgggtgcttataagtcatcaaaggatgatgctaaaattaccgtgattctaagaatctcaaaaactcaattgtatgtgactgcccaagatgaagaccaaccagtgctgctgaaggagatgcctgagatacccaaaaccatcacaggtagtgagaccaacctcctcttcttctgggaaactcacggcactaagaactatttcacatcagttgcccatccaaacttgtttattgccacaaagcaagactactgggtgtgcttggcaggggggccaccctctatcactgactttcagatactggaaaaccaggcgtaggtctggagtctcacttgtctcacttgtgcagtgttgacagttcatatgtaccatgtacatgaagaagctaaatcctttactgttagtcatttgctgagcatgtactgagccttgtaattctaaatgaatgtttacactctttgtaagagtggaaccaacactaacatataatgttgttatttaaagaacaccctatattttgcatagtaccaatcattttaattattattcttcataacaattttaggaggaccagagctactgactatggctaccaaaaagactctacccatattacagatgggcaaattaaggcataagaaaactaagaaatatgcacaatagcagttgaaacaagaagccacagacctaggatttcatgatttcatttcaactgtttgccttctacttttaagttgctgatgaactcttaatcaaatagcataagtttctgggacctcagttttatcattttcaaaatggagggaataatacctaagccttcctgccgcaacagttttttatgctaatcagggagggcattttggtaaaatacttcttgaagccgagcctcaagatgaaggcaaagcacgaaatgttattttttaattattatttatatatgtatttataaatatatttcagataattataatatacctatattgatgggaacccttcatcctctgaggtgtgaccagggcatcctccacaattagccgacagtggtttcctggggataggtaaggtttggtttccattaataccagggcattttgggtccaagttgtgcttaatcccataagccaggga

SEQ ID NO: 6 - protein, 271 aa, Homo sapiens
  misc_feature: Incyte ID No: 2483854CD1
MAKVPDMFEDLKNCYSENEEDSSSIDHLSLNQKSFYHVSYGPLHEGCMDQSVSLSISETSKTSKLTFKESMVVVATNGKVLKKRRLSLSQSITDDDLEAIANDSEEEIIKPRSAPFSFLSNVKYNFMRIIKYEFILNDALNQSIIRANDQYLTAAALHNLDEAVKFDMGAYKSSKDDAKITVILRISKTQLYVTAQDEDQPVLLKEMPEIPKTITGSETNLLFFWETHGTKNYFTSVAHPNLFIATKQDYWVCLAGGPPSITDFQILENQA

SEQ ID NO: 7 - DNA, 664 bp, Homo sapiens
  misc_feature: Incyte ID No: 335942.2
ccaaaatggagggaataatacctaagccttcctgccgcaacagttttttatgctaatcagggaggtcattttggtaaaatacttcttgaagccgagcctcaagatgaaggcaaagcacgaaatgttattttttaattattatttatatatgtatttataaatatatttaagataattataatatactatatttatgggaaccccttcatcctctgagtgtgaccaggcatcctccacaatagcagacagtgttttctgggataagtaagtttgatttcattaatacagggcattttggtccaagttgtgcttatcccatagccaggaaactctgcattctagtacttgggagacctgtaatcatataataaatgtacattaattaccttgagccagtaattggtccgatctttgactcttttgccattaaacttacctgggcattcttgtttcaattccacctgcaatcaagtcctacaagctaaaattagatgaactcaactttgacaaccatgagaccactgttatcaaaactttcttttctggaatgtaatcaatgtttcttctaggttctaaaaattgtgatcagaccataatgttacattattatcaacaatagtgattgatagagtgttatcagtcataactaaataaagcttgcaac

SEQ ID NO: 8 - DNA, 1224 bp, Homo sapiens
  misc_feature: Incyte ID No: 3141226CB1
  unsure 36, 91, 645, 655, 660, 671-672: a, t, c, g, or other
tcgggatcgatctggagctccgggaatttccctggnccgggactccgggctttccagccccaaccatgcataaaaggggttcgccgttctnggagagccacagagcccgggccacaggcagctccttgccagctcttcctctcctctcacagccgccagacccgcctgctgagcccccatggcccgcgctgctctctccgccgcccccagcaatccccggctcctgcgagtggcgctgctgctcctgctcctggtagccgctggccggcgcgcagcaggagcgcccctggccactgaactgcgctgccagtgcttgcagaccctgcagggaattcacctcaagaacatccaaagtgtgaaggtgaagtcccccggaccccactgcgcccaaaccgaagtcatagccacactcaagaatgggcagaaagcttgtctcaaccccgcatcgcccatggttaagaaaatcatcgaaaagatgctgaaaaatggcaaatccaactgaccagaaggaaggaggaagcttattggtggctgttcctgaaggaggccctgcccttacaggaacagaagaggaaagagagacacagctgcagaggccacctgggattgcgcctaatgtgtttgagcatcacttaggagaaggcnccgattaatnaattnattaatttatnnattggttggttttagaagattctatgttaatattttatgtgtaaaataaggttatgattgaatctacttgcacactctcccattatatttattgtttattttaggtcaaacccaagttagttcaatcctgattcatatttaatttgaagatagaaggtttgcagatattctctagtcatttgttaatatttcttcgtgatgacatatcacatgtcagccactgtgatagaggctgaggaatccaagaaaatggccagtaagatcaatgtgacggcagggaaatgtatgtgtgtctattttgtaactgtaaagatgaatgtcagttgttatttattgaaatgatttcacagtgtgtggtcaacatttctcatgttgaagctttaagaactaaaatgttctaaatatcccttggacattttatgtctttcttgtaaggcatactgccttgtttaatgttaattatgcagtgtttccctctgtgttagagcagagaggtttcgatatttattgatgttttcacaaagaacaggaaaataaaatatttaaaaatat

SEQ ID NO: 9 - protein, 107 aa, Homo sapiens
  misc_feature: Incyte ID No: 3141226CD1
MARAALSAAPSNPRLLRVALLLLLLVAAGRRAAGAPLATELRCQCLQTLQGIHLKNIQSVKVKSPGPHCAQTEVIATLKNGQKACLNPASPMVKKIIEKMLKNGKSN

SEQ ID NO: 10 - DNA, 180 bp, Homo sapiens
  misc_feature: Incyte ID No: 159262.1
  unsure 16, 40, 47, 66-69, 77, 79, 85, 88, 92-93, 105, 112-113, 126, 138,143, 146, 158: a, t, c, g, or other
gagcagggacgtactntgcgaactgtgagaccaccacaancacactntagaggaggacagccaatnnnnaccctatntncaatgnctntggnntctactacaagnttcacannattaacagaccantaactatgaagnagganggnatccagtccagnaaccgcaagatgtctagcacat

SEQ ID NO: 11 - DNA, 1101 bp, Homo sapiens
  misc_feature: Incyte ID No: 094071.15
agagaatgttaagttgcccccaccctatccatgcccctgtctgcctagaggctcaggggccttcagggtgaggggagacacattccccaccctctgggagctcctagtctgagagaggaaacactcctgcccaagggagcttccagttagatggcagagagagatgcctctggcttcaggagtcccgagtctaaggagggaaacgactccttcagggagcttcctgctcctaggctgtagccatggctcctgccagactgcacaggagcccccatctgccagccggtgcatgtggccctgctccccagagcctgcgcagatgccatcaaaatgggactctggtcaccctgtcatttcccttctggcagacactaaaatggggagccctgccctcaggggggtgtcccaagtgccatcagaggaggcttggtgactcccagacacaagggaagctttagcgtctgccctcagggtgagatggaggtatcgcctccggcctcagggaaccacagtctgagggggagatgcagcccctgccttcccattcagagaggggttttgtgaggtggcttgggggcatagggcagaagtggatcctacaggctgagctaaggccccaagagcctcagcagtgtacccatcacctggcacctctgcagccacagatccatgatgtgcagttctctggagcaggcgctggctgtgctggtcactaccttccacaagtactcctgccaagaggggcgacaagttcaagctgagtaagggggaaatgaaggaacttctgcacaagggagctgccccagctttgtgggggagaaagtggatgaggaggggctgaagaagctgatgggcaacctggatgagaacagtgaccagcaggtggacttccaggagtatgctgttttcctggcactcatcactgtcatgtgcaatgacttcttccagggctgcccagaccgaccctgaagcagaactcttgactccctgccatggatctcttgggcccaggactgttgatgcctttgagttttgtattcaataaactttttttgtctgttgataatattttaattgctcagtgatgttccataacccggc

SEQ ID NO: 12 - DNA, 5045 bp, Homo sapiens
  misc_feature: Incyte ID No: 1399298.1
tggttgagagttgctctctggggaagtaacaggttgaagtgaaccccaagcaatttgtggataataactagaagaaacttccccctggcttaggagacctaagacctattgcttagtcttggctatgtcactagttagctgtgtgatcctgatcaagtcacttaagttctctgtgcctcggtttcctgatttgtaaaataaaatattgtgctagtttattcttaaatacctttttaatgtccaacatctggtgattctgcgatccatcttccctgacaagtaggggagaaatgagtatctcctacttgcaggaagatgacctaactcaatgctctctgccctatctttgctgtgacttagatcattagtaacctgcctttctgcttttcatcagacccgagagggactcacttatgggaattcatccgcgacatcctcttgaacccagacaagaacccaggattaataaaatgggaagaccgatctgagggcgtcttcaggttcttgaaatcagaggcagtggctcagctatggggtaaaaagaagaacaacagcagcatgacctatgaaaagctcagccgagctatgagatattactacaaaagagaaattctggagcgtgtggatggacgaagactggtatataaatttgggaagaatgcccgaggatggagagaaaatgaaaactgaagctgccaatactttggacacaaaccaaaacacacaccaaataatcagaaacaaagaactcctggacgtaaatatttcaaagactacttttctctgatatttatgtaccatgaggggaacaagaaactacttctaacgggaagaagaaacactacagtcgattaaaaaaattattttgttacttcgaagtatgtcctatatggggaaaaaacgtacacagttttctgtgaaatatgatgctgtatgtggttgtgattttttttcacctctattgtgaattctttttcactgcaagagtaacaggatttgtagccttgtgcttcttgctaagagaaagaaaaacaaaatcagagggcattaaatgttttgtatgtgacatgatttagaaaaaggtgatgcatcctcctcacataagcatccatatggcttcgtcaagggaggtgaacattgttgctgagttaaattccagggtctcagatggttaggacaaagtggatggatgccgggaagtttaacctgagccttaggatccaatgagtggagaatggggacttccaaaacccaaggttggctataatctctgcataaccacatgacttggaatgcttaaatcagcaagaagaataatggtggggtctttatactcattcaggaatggtttatctgatgccagggctgtcttcctttctcccctttggatggttggtgaaatactttaattgccctgtctgctcacttctagctatttaagagagaacccagcttggttcttttttgctccaagtgcttaaaaataagttggaaaaaggagacggtggtgtggaaatggctgaagagtttgctcttgtatccctatagtccaaggtttctcaatctgcacaattgacatttttggccggagtgttctttgtggtgagggctttcctgtgcattgtaagatgttcagcagtatccactcatggtctctaaccacttgacaccagaaaccccccagctgtgataacgcaaaatgtctctagacatcaccaaatgttccctgggggtggcaaatttgcccttgattgagaaccaccagtttagctagtcaatatgaggatggtggtttattctcagaagaaaaagatatgtaaggtcttttagctccttagagtgaagcaaaagcaagacttcaacctcaacctatctttatgttttaaatattagggacaataagttgaaatagctagaggagcttcttttcagaaccccagatgagagccaatgtcagataaagtaagcatagtaatgtagcaggaactacaatagaagacattttcactggaattacaaagcagaattaaaattatattgtagaaggaaacaccaagaaaagaatttccagggaaaatcctctttgcaggtattaattcttataattttttgtcttttggattatctgtttactgtctcatctgaactgatcccaggtgaacggtttattgcctagatttgtactcagaggaattttttttgttttgttttgtcttttaagaaaggaaagaaaggatgaaaaaaataaacagaaaactcagctcaggcacaattgtcaccaaggagttaaaagcttcttcttcaatagaggaattgttctgggggtcctggagacttaccattgagccatgcaatctgggaagcacaggaataagtagacactttgaaaatggatttgaatgttctcatcccttttgcagcttttctttttggctctctcatgtccttggcttgctcctctattctacctctctttctccagcaataatatgcaaatgaagacatgtatccataagaaggagtgctcttcatcaactaatagagcacctaccacagtgtcatacctggtagaggtgagcaattcatattcaaaggttgcaaagtgtttgtaatatattcatgaggctggaagtaagaagaattaaaaatttgtcctaattacaatgagaaccattctaggtagtgatcttggagcacacatgaataactttctgaaggtgcaaccaaatccatttttatttctgcctggcttggtcacctctgtaaaggtttaacttagtgttgtcaagtaacagttactgaaagagctgagaaaaagaacaatgaacagcaacgatcttgactgtgcaactcagacattcctgcagaaaagacatatgttgctttacaagaaggccaaagaactatggggccttcccagcatttgactgttcattgcatagaatgaattaaatatccagttacttgaatgggtataacgcatgaatatttgtgtgtctgtcgtgtgtgtctgagttgtgtgattttattaggggcatctgccaattctctcactgtggttccttctctgactttgcctgttcatcatctaaggaggctagatccttcgctgacttcaccattcctcaaacctgtaagtttctcacttcttccaaattggctttggctctttcttcaacctttccattcaagagcaatctttgctaaggagtaagtgaatgtgaagagtaccaactacaacaattctacagataattagtggattgtgttgtttgttgagagtgaaggtttcttggcatctggtgcctgattaaggcttgagtattaagttctcagcatatctctctattgtcttgacttgagtttgctgcattttctatgtgctgttcgtgacttggagaacttaaagtaatcgagctatgccaacttggggtggtaacagagtacttcccaccacagtgttgaaagggagagcaaagtcttatggataaaccctcctttcttttggggacacatggctctcacttgagaagctcacctgtgctgaatgtccacatggtcactaaacatgttatccttaaaccccccgtatgcctgagttgaaagggctctctcttattaggttttcatgggaacatgaggcagcaaatctattgctaagactttaccaggctcaaatcatctgaggctgatagatatttgacttggtaagacttaagtaaggctctggctcccaggggcataagcaacagtttcttgaatgtgccatctgagaagggagacccaggttgtgagttttcctttgaacacattggtcttttctcaaagttcctgccttgctagactgttagctctttgaggacagggactatgtcttatcaatcactattattttcctgttacctagcatgggacaagtacacaacacatatttgttcaatgaatgaatgaatgtcttctaaaagactcctctgattgggagaccatatctataattgggatgtgaatcatttcttcagtggaataagagcacaacggcacaaccttcaaggacatattatctactatgaacattttactgtgagactctttattttgccttctacttgcgctgaaatgaaaccaaaacaggccgttgggttccacaagtcaatatatgttggatgaggattctgttgccttattgggaactgtgagacttatctggtatgagaagccagtaataaacctttgacctgttttaaccaatgaagattatgaatatgttaatatgatgtaaattgctatttaagtgtaaagcagttctaagttttagtatttgggggattggtttttattatttttttcctttttgaaaaatactgagggatcttttgataaagttagtaatgcatgttagattttagttttgcaagcatgttgtttttcaaatatatcaagtatagaaaaaggtaaaacagttaagaaggaaggcaattatattattcttctgtagttaagcaaacacttgttgagtgcctgctatgtgcacggcatgggcccatatgtgtgaggagcttgtctaattatgtaggaagcaatagatctcggtagttacgtattgggcagatacttactgtatgaatgaaagaacatcacagtaatcacaatatcagagctgaattatcctcagtgtagcttcttggaattcagtttctggaactagagatagagcatttattaaaaaaaactcctgttgagactgtgtcttatgaacctctgaaacgtacaagccttcacaagtttaactaaattgggattaatctttctgtagttatctgcataattcttgtttttctttccatctggctcctgggttgacaatttgtggaaacaactctattgctactatttaaaaaaaatcagaaatctttccctttaagctatgttaaattcaaactattcctgctattcctgttttgtcaaagaattatatttttcaaaatatgtttatttgtttgatgggtcccaggaaacactaataaaaaccacagagaccagcctgg

SEQ ID NO: 13 - DNA, 5511 bp, Homo sapiens
  misc_feature: Incyte ID No: 1075592.6
  unsure 5496: a, t, c, g, or other
aaacttctgcaggggaaaagagctaggaaagagctgcaaagcaggtgtgggctttttcccttttttgctccttttcattacccctcctccgttttcacccttctccggacttcgcgtagaacctgcgaatttcgaagaggaggtggcaaagtgggagaaaagaggtgttagggtttggggtttttttgtttttgtttttgttttttaatttcttgatttcaacattttctcccaccctctcggctgcagccaacgcctcttacctgttctgcggcgccgcgcaccgctggcagctgagggttagaaagcggggtgtattttagattttaagcaaaaattttaaagataaatccatttttctctcccacccccaacgccatctccactgcatccgatctcattatttcggtggttgcttgggggtgaacaattttgtggctttttttcccctataattctgacccgctcaggcttgagggtttctccggcctccgctcactgcgtgcacctggcgctgccctgcttcccccaacctgttgcaaggctttaattcttgcaactgggacctgctcgcaggcaccccagccctccacctctctctacatttttgcaagtgtctgggggagggcacctgctctacctgccagaaattttaaaacaaaaacaaaaacaaaaaaatctccgggggccctcttggcccctttatccctgcactctcgctctcctgccccaccccgaggtaaagggggcgactaagagaagatggtgttgctcaccgcggtcctcctgctgctggccgcctatgcggggccggcccagagcctgggctccttcgtgcactgcgagccctgcgacgagaaagccctctccatgtgcccccccagccccctgggctgcgagctggtcaaggagccgggctgcggctgctgcatgacctgcgccctggccgaggggcagtcgtgcggcgtctacaccgagcgctgcgcccaggggctgcgctgcctcccccggcaggacgaggagaagccgctgcacgccctgctgcacggccgcggggtttgcctcaacgaaaagagctaccgcgagcaagtcaagatcgagagagactcccgtgagcacgaggagcccaccacctctgagatggccgaggagacctactcccccaagatcttccggcccaaacacacccgcatctccgagctgaaggctgaagcagtgaagaaggaccgcagaaagaagctgacccagtccaagtttgtcgggggagccgagaacactgcccacccccggatcatctctgcacctgagatgagacaggagtctgagcagggcccctgccgcagacacatggaggcttccctgcaggagctcaaagccagcccacgcatggtgccccgtgctgtgtacctgcccaattgtgaccgcaaaggattctacaagagaaagcagtgcaaaccttcccgtggccgcaagcgtggcatctgctggtgcgtggacaagtacgggatgaagctgccaggcatggagtacgttgacggggactttcagtgccacaccttcgacagcagcaacgttgagtgatgcgtccccccccaacctttccctcaccccctcccacccccagccccgactccagccagcgcctccctccaccccaggacgccactcatttcatctcatttaagggaaaaatatatatctatctatttgaggaaactgaggacctcggaatctctagcaagggctcaacttcgaaaatggcaacaacagagatgcaaaaagctaaaaagacaccccccccctttaaatggttttctttttgaggcaagttggatgaacagagaagggaagagaggaagaacgagaggaagagaagggaaggaagtgtttgtgtagaagagagagaaagacgaatagagttaggaaaaggaagacaagcaggtgggcaggaaggacatgcaccgagaccaggcaggggcccaactttcacgtccagccctggcctggggtcgggagaggtgggcgctagaagatgcagcccaggatgtggcaatcaatgacactattggggtttcccaggatggattggtcagggggagaaaggaaaaggcaaaacactccaggacctctcccggatctgtctcctcctctagccagcagtatggacagctggacccctgaacttcctctcctcttacctgggcagagtgttgtctctccccaaatttataaaaactaaaatgcattccattcctctgaaagcaaaacaaattcataattgagtgatattaaatagagaggttttcggaagcagatctgtgaatatgaaatacatgtgcatatttcattccccaggcagacattttttagaaatcaatacatgccccaatattggaaagacttgttcttccacggtgactacagtacatgctgaagcgtgccgtttcagccctcatttaattcaatttgtaagtagcgcagcagcctctgtgggggaggataggctgaaaaaaaaaagtgggctcgtatttatctacaggactccatatagtcatatataggcatataaatctattctttttctttgtttttttctttcttcctttctttcaaaggtttgcattaacttttcaaagtagttcctataggggcattgaggagcttcctcattctgggaaaactgagaaaacccatattctcctaatacaacccgtaatagcatttttgcctgcctcgaggcagagtttcccgtgagcaataaactcagcttttttgtggggcacagtactggatttgacagtgattccccacgtgtgttcatctgcacccaccgagccaggcagaggccagccctccgtggtgcacacagcacgcgcctcagtccatcccattttagtctttaaaccctcaggaagtcacagtctccggacaccacaccacatgagcccaacaggtccacgatggatccaccagtcccaccccagccttttcctttcatctgaacagaatgtgcatttttggaagcctccctcactctccatgctggcagagcaggagggagactgaagtaagagatggcagagggagatggtggcaaaaaggtttagatgcaggagaacagtaagatggatggttccggccagagtcgatgtggggaggaacagagggctgaagggagagggggctgactgttccattctagctttggcacaaagcagcagaaagggggaaaagccaatagaaatttccttagcttccccaccatatgtattttctaggatttgagaggaaagagaggaaaatgggggaatgggttgcaaaatagaaatgagcttaatccaggccgcagagccagggaaggtgagtaactttaggagggtgctagactttagaagccagataggaagaatcagtctaaactggccatgctttggaagggacaagactatgtgctccgctgcccaccttcagcctgcaatgagggactgaggcccacgagtctttccagctcttcctccattctggccagtccctgcatcctccctggggtggaggatggaaggaaagctgggacaagcagggaacgcatgattcagggatgctgtcactcggcagccagattccgaaactcccattctccaatgacttcctcaaccaatgggtggccttgtgactgttctttaaggctgaagatatccaggaaagggggcttggacactggccaaggagaccccttcgtgctgtggacacagctctcttcactctttgctcatggcatgacacagcggagaccgcctccaacaacgaatttggggctacgaagaggaatagcgaaaaagcaaatctgtttcaactgatgggaaccctatagctatagaacttgggggctatctcctatgcccctggacaggacagttggctggggacaggagaagtgctcaatcttcatgagacaaaggggcccgatagggccagcagccacaaggccttgacctgccgagtcagcatgccccatctctctgcacagctgtcccctaaacccaactcacgtttctgtatgtcttaggccagtatcccaaacctcttccacgtcactgttctttccacccattctccctttgcatcttgagcagttatccaactaggatctgccaagtggatactggggtgccactcccctgagaaaagactgagccaggaactacaagctccccccacattcctcccagcctggacctaattcttgagaggggctctctcttcacggactgtgtctggactttgagcaggcttctgccccttgcgttggctctttgctgccagccatcaggtgggggattagagcctggtgtaagtgcgccagactcttccggtttccaaagttcgtgcctgcgaacccaaacctgtgagtctcttctgcatgcaggagtttctcctgggcagctggtcactccccagagaagctgggccttcatggacacatggaactaagcctcccaaatgggagttctggctgagcccagggtggggagatcctgggaagggaggcactggaggaagacggcacctcttcccccatggcagggtgtgagggaggcaggtttggaatggtgcgagtatggcaatctaagcaggggtctggtctctttgactccaggctggcctttggccgactgtctgctcacccagagaccttggactccggactatccatggctccgaatctaagtgctgcccactcccatgctcacacccacagaaggtcttcccatcccctttagattcgtgcctcactccaccagtgaggaagatgcctctgtctttcccacgactgccaggagatagggaagcccagccaggactgaccctccttcctccagcctgccctgacccacctggcaaagcagggcacatggggaggaagagactggaacctttctttgacagccaggcctagacagacaggcctggggacactggccccatgaggggaggaaggcaggcgcacgaggtccagggaggcccttttctgatcatgccccttctctcccaccccatctccccaccaccacctctgtggcctccatggtacccccacagggctggcctcccctagagggtgggcctcaaccacctgctcccgccacgcaccggttagtgagacagggctgccacggcaaccgccaagcccccctcaaggtgggacagtaccccggacccatccactcactcctgagagggctccggcccagaatgggaacctcagagaagagctctaaggagaagaaaccccatagcgtcagagaggatatgtctggcttccaagagaaaggaggctccgttttgcaaagtggaggagggacgagggacaggggtttcaccagccagcaacctgggcctgtactgtctgtgtttttaaaaccactaaagtgcaagaatacattgcactgtttctccacttttatttccttagctttgttctattcaacatacttntggttctatgagata

SEQ ID NO: 14 - DNA, 1057 bp, Homo sapiens
  misc_feature: Incyte ID No: 443762CB1
gccgcagcacctcctcgccagctcttcctctcctctcacagccgccagacccgcctgctgagccccatggcccgcgctgctctctccgccgcccccagcaatccccggctcctgcgagtggcgctgctgctcctgctcctggtagccgctggccggcgcgcagcaggagcgtccgtggccactgaactgcgctgccagtgcttgcagaccctgcagggaattcaccccaagaacatccaaagtgtgaacgtgaagtcccccggaccccactgcgcccaaaccgaagtcatagccacactcaagaatgggcggaaagcttgcctcaatcctgcatcccccatagttaagaaaatcatcgaaaagatgctgaacagtgacaaatccaactgaccagaagggaggaggaagctcactggtggctgttcctgaaggaggccctgcccttataggaacagaagaggaaagagagacacagctgcagaggccacctggattgtgcctaatgtgtttgagcatcgcttaggagaagtcttctatttatttatttattcattagttttgaagattctatgttaatattttaggtgtaaaataattaagggtatgattaactctacctgcacactgtcctattatattcattctttttgaaatgtcaaccccaagttagttcaatctggattcatatttaatttgaaggtagaatgttttcaaatgttctccagtcattatgttaatatttctgaggagcctgcaacatgccagccactgtgatagaggctggcggatccaagcaaatggccaatgagatcattgtgaaggcaggggaatgtatgtgcacatctgttttgtaactgtttagatgaatgtcagttgttatttattgaaatgatttcacagtgtgtggtcaacatttctcatgttgaaactttaagaactaaaatgttctaaatatcccttggacattttatgtctttcttgtaaggcatactgccttgtttaatggtagttttacagtgtttctggcttagaacaaaggggcttaattattgatgtt

SEQ ID NO: 15 - protein, 107 aa, Homo sapiens
  misc_feature: Incyte ID No: 443762CD1
MARAALSAAPSNPRLLRVALLLLLLVAAGRRAAGASVATELRCQCLQTLQGIHPKNIQSVNVKSPGPHCAQTEVIATLKNGRKACLNPASPIVKKIIEKMLNSDKSN

SEQ ID NO: 16 - DNA, 2039 bp, Homo sapiens
  misc_feature: Incyte ID No: 1256053CB1
agcagcctgggcggcaggggcggtggctggagctcggtaaagctcgtgggaccccattgggggaatttgatccaaggaagcggtgattgccgggggaggagaagctcccagatccttgtgtccacttgcagcgggggaggcggagacggcggacgggccttttggcgtccactgcgcggctgcaccctgccccatcctgccgggatcatggtctgcggcagcccgggagggatgctgctgctgcgggccgggctgcttgccctggctgctctctgcctgctccgggtgcccggggctcgggctgcagcctgtgagcccgtccgcatccccctgtgcaagtccctgccctggaacatgactaagatgcccaaccacctgcaccacagcactcaggccaacgccatcctggccatcgagcagttcgaaggtctgctgggcacccactgcagccccgatctgctcttcttcctctgtgccatgtacgcgcccatctgcaccattgacttccagcacgagcccatcaagccctgtaagtctgtgtgcgagcgggcccggcagggctgtgagcccatactcatcaagtaccgccactcgtggccggagaacctggcctgcgaggagctgccagtgtacgacaggggcgtgtgcatctctcccgaggccatcgttactgcggacggagctgattttcctatggattctagtaacggaaactgtagaggggcaagcagtgaacgctgtaaatgtaagcctattagagctacacagaagacctatttccggaacaattacaactatgtcattcgggctaaagttaaagagataaagactaagtgccatgatgtgactgcagtagtggaggtgaaggagattctaaagtcctctctggtaaacattccacgggacactgtcaacctctataccagctctggctgcctctgccctccacttaatgttaatgaggaatatatcatcatgggctatgaagatgaggaacgttccagattactcttggtggaaggctctatagctgagaagtggaaggatcgactcggtaaaaaagttaagcgctgggatatgaagcttcgtcatcttggactcagtaaaagtgattctagcaatagtgattccactcagagtcagaagtctggcaggaactcgaacccccggcaagcacgcaactaaatcccgaaatacaaaaagtaacacagtggacttcctattaagacttacttgcattgctggactagcaaaggaaaattgcactattgcacatcatattctattgtttactataaaaatcatgtgataactgattattacttctgtttctcttttggtttctgcttctctcttctctcaacccctttgtaatggtttgggggcagactcttaagtatattgtgagttttctatttcactaatcatgagaaaaactgttcttttgcaataataataaattaaacatgctgttaccagagcctctttgctggagtctccagatgttaatttactttctgcaccccaattgggaatgcaatattggatgaaaagagaggtttctggtattcacagaaagctagatatgccttaaaacatactctgccgatctaattacagccttatttttgtatgccttttgggcattctcctcatgcttagaaagttccaaatgtttataaaggtaaaatggcagtttgaagtcaaatgtcacataggcaaagcaatcaagcaccaggaagtgtttatgaggaaacaacacccaagatgaattatttttgagactgtcaggaagtaaaataaataggagcttaagaaagaacattttgcctgattgagaagcacaactgaaaccagtagccgctggggtgttaatggtagcattcttcttttggcaatacatttgatttgttcatgaatatattaatcagcattagagaaatgaattataactagacatctgctgttatcaccatagttttgtttaatttgcttccttttaaataaacccattggtgaaagtcaacaaaaaaaaaaaa

SEQ ID NO: 17 - protein, 325 aa, Homo sapiens
  misc_feature: Incyte ID No: 1256053CD1
MVCGSPGGMLLLRAGLLALAALCLLRVPGARAAACEPVRIPLCKSLPWNMTKMPNHLHHSTQANAILAIEQFEGLLGTHCSPDLLFFLCAMYAPICTIDFQHEPIKPCKSVCERARQGCEPILIKYRHSWPENLACEELPVYDRGVCISPEAIVTADGADFPMDSSNGNCRGASSERCKCKPIRATQKTYFRNNYNYVIRAKVKEIKTKCHDVTAVVEVKEILKSSLVNIPRDTVNLYTSSGCLCPPLNVNEEYIIMGYEDEERSRLLLVEGSIAEKWKDRLGKKVKRWDMKLRHLGLSKSDSSNSDSTQSQKSGRNSNPRQARN

SEQ ID NO: 18 - DNA, 1816 bp, Homo sapiens
  misc_feature: Incyte ID No: 1132386.3
gtttctctagctcatgaatctttttttccagggtagactgtctttgaattgcttcttctttttctttgaccatttttcttaatgtgtgaacttgagtatttgcatctttgtgagatttcccggacgacatccagctccttgttcctctgcatgagttgcttttccagttcccacaatcttggacatggcttcatttctctgtgtcttgcagtttttcagataaatgagaaatgttttcttccagttcttccaccctctccaaggcagcattcttagtttcagcatcttcccagtagagctcctacatcaaaaacattgtccaggtaagcctggatctggacttgaagcttgtcactctcagtgtgtttcagcttgtccaagtattcgtccaggcctaatttggtaaattcatactgcaggtgaactctgaaattcatatcttctactgaatggactacaatattaataaaccggattagaagccaccataaaatctatgtcattgtcttcattcctgaaatgtgccatcaacttctcaaagcgctgtttttctccacaaacctctttaaagttatcaaatgctgataaaatgatttcatgcccgcctctgacaagacaaacggctgccaacagttctaagacaagggcttttgttctgggattcttgttgttcaggcttagtgcaatctcattgacagcgtgtggatgagacatgaccatgttgaaaccagactgataattcatgatggcacgtaaacacatgttacagacatgcacatcatctttcttactcactaatcttgaatttttgagagttcttctgcttggcaatgtattatatcgcagtgcagaatgtcttccagagcgggagacacttgttgcccacaggtgagggcaggttgctccctctgtgcaggtcctcgatggacctactccagggctttgatttgtccaccgagctctccacagtactctccacactttcaaagtcaaaagttaccgcgtactgtgcaaatgagagatattccactacgaacatcaagacctttgttttcttcattcagaaattctctgacccatccaatgtggttagttctcaaagaaatttccagttctcttagcacttgtgtagatttcttgaacacgccgtctgaatttcttcctggttacagctggatccagatagcctttgagcttttgaatgtactgtatggggaggattcttcacctggaatcgttcctgatcacaaatcagttcccattttttctcattatcatactgccgcagtaacctggctttgtcaggaggtaggttcatagcattcagcacgatggcaaatcgctcctccagttcacctggctctggcatcggcagcttcaaaggcacggttgtgcgccctgaaatccgttctgctgcgaatccaatgctccctgcgttgcccatgtcggcggcgcgccggggccgggggctgctccgggcccctagcgtgcgcgtcggaaatcagaacagctcccggcggtcggctgccgcccgcaggcgcgacctgcccggctcccccgcccttcggccgcgcccaggcgggtgtgcggcgcgcaccgttccctagcagcgctccaagccgagccgccccccggcctccctcatgctctccgccgccccagcgcggccccggcctcttttcctcgggaggggtagtcggggcgctgggcgcctatgtgcatggtgctccgcttggcacaccgcccccttgccagagatcgcggcccccggcgcgtggtccctcctactcggcctttctgccgggcccgcggccgc

SEQ ID NO: 19 - DNA, 689 bp, Homo sapiens
  misc_feature: Incyte ID No: 2748261CB1
gagactcgtcaccaggcgtgcagtgggcactgctgggctcccccatcccgtcctaacccggaacagccccgggcaggaggcgtggaaagtcgagggggtaaaccgcgaatgtgcgttgtgtaagccacggcgcagggtggggcgcgggcgggacttgggcgggcggggtgggcttggccgagctggcctccggggcaccgaccgctataaggccagtcggactgcgacacagcccatcccctcgaccgctcgcgtcgcatttggccgcctccctaccgctccaagcccagccctcagccatggcatgccccctggatcaggccattggcctcctcgtggccatcttccacaagtactccggcagggagggtgacaagcacaccctgagcaagaaggagctgaaggagctgatccagaaggagctcaccattggctcgaagctgcaggatgctgaaattgcaaggctgatggaagacttggaccggaacaaggaccaggaggtgaacttccaggagtatgtcaccttcctgggggccttggctttgatctacaatgaagccctcaagggctgaaaataaatagggaagatggagacaccctctgggggtcctctctgagtcaaatccagtggtgggtaattgtacaataaattttttttggtcaaatttaaaaaatgcaaaaaaaaaaaa

SEQ ID NO: 20 - protein, 90 aa, Homo sapiens
  misc_feature: Incyte ID No: 2748261CD1
MACPLDQAIGLLVAIFHKYSGREGDKHTLSKKELKELIQKELTIGSKLQDAEIARLMEDLDRNKDQEVNFQEYVTFLGALALIYNEALKG

SEQ ID NO: 21 - DNA, 419 bp, Homo sapiens
  misc_feature: Incyte ID No: 234630.21
  unsure 96, 181: a, t, c, g, or other
tttccaaaagttttatattgagattcttggtgttgttatgaatctcaatataaaacttttggaaaggttctgctagaaaagccaattctaccaganttgaaatatggattcataacaacaccaagaattgattttgtagccaacattcattcaatactgttatatcagaggagtaggaganaggaaacatttgacttatctggaaaagcaaaatgtacttaagaataagaataacatggtccattcacctttatgttatagatatgtctttgtgtaaatcattgttttgagttttcaaagaatagcccattgttcattcttgtgctgtacaatgaccactgttattgttacttgactttcagagcacacccttcctctggtttttgtatatttatgatggatcaataataatgaggaaa

SEQ ID NO: 22 - DNA, 4674 bp, Homo sapiens
  misc_feature: Incyte ID No: 234630.58
  unsure 2291, 2500: a, t, c, g, or other
agcggaccccagcctctgccaggttcggtccgccatcctcgtcccgtcctccgccggcccctgccccgcgcccagggatcctccagctcctttcgcccgcgccctccgttcgctccggacaccatggacaagttttggtggcacgcagcctggggactctgcctcgtgccgctgagcctggcgcagatcgatttgaatataacctgccgctttgcaggtgtattccacgtggagaaaaatggtcgctacagcatctctcggacggaggccgctgacctctgcaaggctttcaatagcaccttgcccacaatggcccagatggagaaagctctgagcatcggatttgagacctgcaggtatgggttcatagaagggcatgtggtgattccccggatccaccccaactccatctgtgcagcaaacaacacaggggtgtacatcctcacatccaacacctcccagtatgacacatattgcttcaatgcttcagctccacctgaagaagattgtacatcagtcacagacctgcccaatgcctttgatggaccaattaccataactattgttaaccgtgatggcacccgctatgtccagaaaggagaatacagaacgaatcctgaagacatctaccccagcaaccctactgatgatgacgtgagcagcggctcctccagtgaaaggagcagcacttcaggaggttacatcttttacaccttttctactgtacaccccatcccagacgaagacagtccctggatcaccgacagcacagacagaatccctgctaccaatatggactccagtcatagtacaacgcttcagcctactgcaaatccaaacacaggtttggtggaagatttggacaggacaggacctctttcaatgacaacgcagcagagtaattctcagagcttctctacatcacatgaaggcttggaagaagataaagaccatccaacaacttctactctgacatcaagcaataggaatgatgtcacaggtggaagaagagacccaaatcattctgaaggctcaactactttactggaaggttatacctctcattacccacacacgaaggaaagcaggaccttcatcccagtgacctcagctaagactgggtcctttggagttactgcagttactgttggagattccaactctaatgtcaatcgttccttatcaggagaccaagacacattccaccccagtggggggtcccataccactcatggatctgaatcagatggacactcacatgggagtcaagaaggtggagcaaacacaacctctggtcctataaggacaccccaaattccagaatggctgatcatcttggcatccctcttggccttggctttgattcttgcagtttgcattgcagtcaacagtcgaagaaggtgtgggcagaagaaaaagctagtgatcaacagtggcaatggagctgtggaggacagaaagccaagtggactcaacggagaggccagcaagtctcaggaaatggtgcatttggtgaacaaggagtcgtcagaaactccagaccagtttatgacagctgatgagacaaggaacctgcagaatgtggacatgaagattggggtgtaacacctacaccattatcttggaaagaaacaaccgttggaaacataaccattacagggagctgggacacttaacagatgcaatgtgctactgattgtttcattgcgaatcttttttagcataaaattttctactctttttgttttttgtgttttgttctttaaagtcaggtccaatttgtaaaaacagcattgctttctgaaattagggcccaattaataatcagcaagaattttgatcgttccagttccccacttggaggcctttcatccctcgggtgtgctatggatggcttctaacaaaaactacacatatgtattcctgatcgccaacctttcccccaccagctaagacatttcccagggttaatagggcctggtcctgggaggaaatttgaatgggtccattttgcccttccatagcctaatccctgggcattgctttccactgaggttgggggttggggtgtactagttacacatcttcaacagaccccctctagaaatttttcagatgcttctgggagacacccaaagggtgaagctatttatctgtagtaaactatttatctgtgtttttgaaatattaaaccctggatcagtcctttgatcagtataattttttaaagttactttgtcagaggcacaaaagggtttaaactgattcataataaatatctgtacttcttngatcttcaccttttgtgctgtgattcttcagtttctaaaccagcactgtctgggtccctacaatgtatcaggaagagctgagaatggtaaggagactcttctaagtcttcatctcagagaccctgagttcccactcagacccactcagccaaatctcatggaagaccaaggagggcagcactgtttttgttttttgttttttgtttttntttttttgacactgtccaaaggttttccatcctgtcctggaatcagagttggaagctgaggagcttcagcctcttttatggtttaatggccacctgttctctcctgtgaaaggctttgcaaagtcacattaagtttgcatgacctgttatccctggggccctatttcatagaggctggccctattagtgatttccaaaaacaatatggaagtgccttttgatgtcttacaataagagaagaagccaatggaaatgaaagagattggcaaaggggaaggatgatgccatgtagatcctgtttgacatttttatggctgtatttgtaaacttaaacacaccagtgtctgttcttgatgcagttgctatttaggatgagttaagtgcctggggagtccctcaaaaggttaaagggattcccatcattggaatcttatcaccagataggcaagtttatgaccaaacaagagagtactggctttatcctctaacctcatattttctcccacttggcaagtcctttgtggcatttattcatcagtcagggtgtccgattggtcctagaacttccaaaggctgcttgtcatagaagccattgcatctataaagcaacggctcctgttaaatggtatctcctttctgaggctcctactaaaagtcatttgttacctaaacttatgtgcttaacaggcaatgcttctcagaccacaaagcagaaagaagaagaaaagctcctgactaaatcagggctgggcttagacagagttgatctgtagaatatctttaaaggagagatgtcaactttctgcactattcccagcctctgctcctccctgtctaccctctcccctccctctctccctccacttcaccccacaatcttgaaaaacttcctttctcttctgtgaacatcattggccagatccattttcagtggtctggatttctttttattttcttttcaacttgaaagaaactggacattaggccactatgtgttgttactgccactagtgttcaagtgcctcttgttttcccagagatttcctgggtctgccagaggcccagacaggctcactcaagctctttaactgaaaagcaacaagccactccaggacaaggttcaaaatggttacaacagcctctacctgtcgccccagggagaaaggggtagtgatacaagtctcatagccagagatggttttccactccttctagatattcccaaaaagaggctgagacaggaggttattttcaattttattttggaattaaatacttttttccctttattactgttgtagtccctcacttggatatacctctgttttcacgatagaaataagggaggtctagagcttctattccttggccattgtcaacggagagctggccaagtcttcacaaacccttgcaacattgcctgaagtttatggaataagatgtattctcactcccttgatctcaagggcgtaactctggaagcacagcttgactacacgtcatttttaccaatgattttcaggtgacctgggctaagtcatttaaactgggtctttataaaagtaaaaggccaacatttaattattttgcaaagcaacctaagagctaaagatgtaatttttcttgcaattgtaaatcttttgtgtctcctgaagacttcccttaaaattagctctgagtgaaaaatcaaaagagacaaaagacatcttcgaatccatatttcaagcctggtagaattggcttttctagcagaacctttccaaaagttttatattgagattcataacaacaccaagaattgattttgtagccaacattcattcaatactgttatatcagaggagtaggagagaggaaacatttgacttatctggaaaagcaaaatgtacttaagaataagaataacatggtccattcacctttatgttatagatatgtctttgtgtaaatcatttgttttgagttttcaaagaatagcccattgttcattcttgtgctgtacaatgaccactgttattgttactttgacttttcagagcacacccttcctctggtttttgtatatttattgatggatcaataataatgaggaaagcatgatatgtatattgctgagttgaaagcacttattggaaaatattaaaaggctaacattaaaagactaaaggaaacag

SEQ ID NO: 23 - DNA, 2774 bp, Homo sapiens
  misc_feature: Incyte ID No: 290021.8
aagaggctccacgttgggcggggatggggcctgaaactgtctgggtctgagctggggagcggaagccacttgtccctctccctccccaggacttctgtgactcctgggccacagaggtccaaccaggctaagggcctggggataccccctgcctggcccccttgcccaaactggcaggggggccaggctgggcagcagcccctctttcacctcaactatggatctcctgcctcccaagcccaagtacaatccactccggaatgagtctctgtcatcgctggaggaaggggcttctgggtccacccccccggaggagctgccttccccatcagcttcatccctggggcccatcctgcctcctctgcctggggacgatagtcccactaccctgtgctccttcttcccccggatgagcaacctgaggctggccaacccggctggggggcgcccagggtctaagggggagccaggaagggcagctgatgatggggaggggatcgtaggggcagccatgccagactcaggccccctacccctcctccaggacatgaacaagctgagtggaggcggcgggcgcaggactcgggtggaagggggccagcttgggggcgaggagtggacccgccacgggagctttgtcaataagcccacgcggggctggctgcatcccaacgacaaagtcatgggacccggggtttcctacttggttcggtacatgggttgtgtggaggtcctccagtcaatgcgtgccctggacttcaacacccggactcaggtcaccagggaggccatcagtctggtgtgtgaggctgtgccgggtgctaagggggcgacaaggaggagaaagccctgtagccgcccgctcagctctatcctggggaggagtaacctgaaatttgctggaatgccaatcactctcaccgtctccaccagcagcctcaacctcatggccgcagactgcaaacagatcatcgccaaccaccacatgcaatctatctcatttgcatccggcggggatccggacacagccgagtatgtcgcctatgttgccaaagaccctgtgaatcagagagcctgccacattctggagtgtcccgaagggcttgcccaggatgtcatcagcaccattggccaggccttcgagttgcgcttcaaacaatacctcaggaacccacccaaactggtcacccctcatgacaggatggctggctttgatggctcagcatgggatgaggaggaggaagagccacctgaccatcagtactataatgacttcccggggaaggaaccccccttggggggggtggtagacatgaggcttcgggaaggagccgctccaggggctgctcgacccactgcacccaatgcccagacccccagccacttgggagctacattgcctgtaggacagcctgttgggggagatccagaagtccgcaaacagatgccacctccaccaccctgtccaggcagagagctttttgatgatccctcctatgtcaacgtccagaacctagacaaggcccggcaagcagtgggtggtgctgggccccccaatcctgctatcaatggcagtgcaccccgggacctgtttgacatgaagcccttcgaagatgctcttcgcgtgcctccacctccccagtcggtgtccatggctgagcagctccgaggggagccctggttccatgggaagctgagccggcgggaggctgaggcactgctgcagctcaatggggacttcctggtacgggagagcacgaccacacctggccagtatgtgctcactggcttgcagagtgggcagcctaagcatttgctactggtggaccctgagggtgtggttcggactaaggatcaccgctttgaaagtgtcagtcaccttatcagctaccacatggacaatcacttgcccatcatctctgcgggcagcgaactgtgtctacagcaacctgtggagcggaaactgtgatctgccctagcgctctcttccagaagatgccctccaatcctttccaccctattccctaactctcgggacctcgtttgggagtgttctgtgggcttggccttgtgtcagagctgggagtagcatggactctgggtttcatatccagctgagtgagagggtttgagtcaaaagcctgggtgagaatcctgcctctccccaaacattaatcaccaaagtattaatgtacagagtggcccctcacctgggcctttcctgtgccaacctgatgccccttccccaagaaggcctgtgaggtaactgggatcgcaccttttataccagagacctgaggcagatgaaatttatttccatctaggactagaaaaacttgggtctcttaccgcgagactgagaggcagaagtcagcccgaatgcctgtcagtttcatggaggggaaacgcaaaacctgcagttcctgagtaccttctacaggcccggcccagcctaggcccggggtggccacaccacagcaagccggccccccctcttttggccttgtggataagggagagttgaccgttttcatcctggcctccttttgctgtttggatgttttccctttggtataagtgagacccgtggaaacatccaaacagcaaaaggaggccaggatgaaaacggtcaactctcccttatccacaaggccaaaagagggggggccggcttgctgtggtgtggccaccccgggcctaggctgggccgggcctgtagaaggtactcacttataccaaagggaaaactcttcattaaagtccgtatttcttct

SEQ ID NO: 24 - DNA, 795 bp, Homo sapiens
  misc_feature: Incyte ID No: 331749.3
attttacatacactgtatgttatagaacttcatggatcagatctggggcagcaccctataaatcaccaccttaatatgctgcaacaaaatgtagaatattcagacaaaatggatacataaagactaagtagcccataaggggtcaaattttgctgccaaatgcgtatgccaccaacttacaaaaacacttcgttcgcagagcttttcagattgtggaatgttggataaggaattatagacctctagtagctgaaatgcaagaccccaagaggaagttcagatcttaatataaattcactttcatttttgatagctgtcccatctggtcatttggttggcactagactggtggcaggggcttctagctgactcgcacagggattctcacaatagccgatatcagaatttgtgttgaaggaacttgtctcttcatctaatatgatagcgggaaaaggagaggaaactactgcctttagaaaatataagtaaagtgattaaagtgctcacgttaccttgacacatagtttttcagtctatgggtttagttactttagatggcaagcatgtaacttatattaatagtaatttgtaaagttggttggataagctatccatgttgcaggttcatggattacttctctataaaaaatatgtatttaccaaaaaattttgtgacattccttctcccatctcttccttgacatgcattgtaaataggttcttcttgttctgagattcaatattgaatttctcctatgctattgacaataaaatattattgaactacaaaaaaaa

SEQ ID NO: 25 - DNA, 611 bp, Homo sapiens
  misc_feature: Incyte ID No: 237612.4
gcaagaagacttgcctggcggcatactcattttccccatgcctctttgctgtttgtggaaaataaagcattctataggcggagctagtgaacgcctcttttaaaacacgagtctccacacttccctgttcactttggttccagcatcctgtccagcaaagaagcaatcagccaaaatgatacctggaggcttatctgaggccaaacccgccactccagaaatccaggagattgttgataaggttaaaccacagcttgaagaaaaaacaaatgagacttatggaaaattggaagctgtgcagtataaaactcaagttgttgctggaacaaattactacattaaggtacgagcaggtgataataaatatatgcacttgaaagtattcaaaagtcttcccggacaaaatgaggacttggtacttactggataccaggttgacaaaaacaaggatgacgagctgacgggcttttagcagcatgtacccaaagtgttctgattccttcaactggctactgagtcatgatccttgctgataaatataaccatcaataaagaagcattcttttccaaagaaattatttcttcaattatttctcatttattgtattaag

SEQ ID NO: 26 - DNA, 661 bp, Homo sapiens
  misc_feature: Incyte ID No: 234732.41
ctcagctacagcacagatcaggtgaggagcacaccaaggagtgatttttaaaacttactctgttttctctttcccaacaagattatcatttcctttaaaaaaaatagttatcctggggcatacagccataccattctgaaggtgtcttatctcctctgatctagagagcaccatgaagcttctcacgggcctggttttctgctccttggtcctgggtgtcagcagccgaagcttcttttcgttccttggcgaggcttttgatggggctcgggacatgtggagagcctactctgacatgagagaagccaattacatcggctcagacaaatacttccatgctcgggggaactatgatgctgccaaaaggggacctgggggtgcctgggctgcagaagcgatcagcgatgccagagagaatatccagagattctttggccatggtgcggaggactcgctggctgatcaggctgccaatgaatggggcaggagtggcaaagaccccaatcacttccgacctgctggcctgcctgagaaatactgagcttcctcttcactctgctctcaggagatctggctgtgaggccctcagggcagggatacaaagcggggagagggtacacaatgggtatctaataaatacttaagaggtggaatttgtgga

SEQ ID NO: 27 - DNA, 516 bp, Homo sapiens
  misc_feature: Incyte ID No: 234732.39
gctcgagagctcagctacagcacagatcagcaccatgaagcttctcacgggcctggttttctgctccttggtcctgggtgtcagcagccgaagcttcttttcgttccttggcgaggcttttgatggggctcgggacatgtggagagcctactctgacatgagagaagccaattacatcggctcagacaaatacttccatgctcgggggaactatgatgctgccaaaaggggacctgggggtgtctgggctgcagaagcgatcagcgatgccagagagaatatccagagattctttggccatggtgcggaggactcgctggctgatcaggctgccaatgaatggggcaggagtggcaaagaccccaatcacttccgacctgctggcctgcctgagaaatactgagcttcctcttcactctgctctcaggagatctggctgtgaggccctcagggcagggatacaaagcggggagagggtacacaatgggtatctaataaatacttaagaggtggaaa

SEQ ID NO: 28 - DNA, 4462 bp, Homo sapiens
  misc_feature: Incyte ID No: 253903.1
cctgcagcctccggagtcagtgccgcgcgcccgccgccccgcgccttcctgctcgccgcacctccgggagccggggcgcacccagcccgcagcgccgcctccccgcccgcgccgcctccgaccgcaggccgagggccgccactggccggggggaccgggcagcagcttgcggccgcggagccgggcaacgctggggactgcgccttttgtccccggaggtccctggaagtttgcggcaggacgcgcgcggggaggcggcggaggcagccccgacgtcgcggagaacagggcgcagagccggcatgggcatcgggcgcagcgaggggggccgccgcggggccctgggcgtgctgctggcgctgggcgcggcgcttctggccgtgggctcggccagcgagtacgactacgtgagcttccagtcggacatcggcccgtaccagagcgggcgcttctacaccaagccacctcagtgcgtggacatccccgcggacctgcggctgtgccacaacgtgggctacaagaagatggtgctgcccaacctgctggagcacgagaccatggcggaggtgaagcagcaggccagcagctgggtgcccctgctcaacaagaactgccacgccggcacccaggtcttcctctgctcgctcttcgcgcccgtctgcctggaccggcccatctacccgtgtcgctggctctgcgaggccgtgcgcgactcgtgcgagccggtcatgcagttcttcggcttctactggcccgagatgcttaagtgtgacaagttccccgagggggacgtctgcatcgccatgacgccgcccaatgccaccgaagcctccaagccccaaggcacaacggtgtgtcctccctgtgacaacgagttgaaatctgaggccatcattgaacatctctgtgccagcgagtttgcactgaggatgaaaataaaagaagtgaaaaaagaaaatggcgacaagaagattgtccccaagaagaagaagcccctgaagttggggcccatcaagaagaaggacctgaagaagcttgtgctgtacctgaagaatggggctgactgtccctgccaccagctggacaacctcagccaccacttcctcatcatgggccgcaaggtgaagagccagtacttgctgacggccatccacaagtgggacaagaaaaacaaggagttcaaaaacttcatgaagaaaatgaaaaaccatgagtgccccacctttcagtccgtgtttaagtgattctcccgggggcagggtggggagggagcctcgggtggggtgggagcgggggggacagtgccccgggaacccggtgggtcacacacacgcactgcgcctgtcagtagtggacattgtaatccagtcggcttgttcttgcagcattcccgctcccttccctccatagccacgctccaaaccccagggtagccatggccgggtaaagcaagggccatttagattaggaaggtttttaagatccgcaatgtggagcagcagccactgcacaggaggaggtgacaaaccatttccaacagcaacacagccactaaaacacaaaaagggggattgggcggaaagtgagagccagcagcaaaaactacattttgcaacttgttggtgtggatctattggctgatctatgcctttcaactagaaaattctaatgattggcaagtcacgttgttttcaggtccagagtagtttctttctgtctgctttaaatggaaacagactcataccacacttacaattaaggtcaagcccagaaagtgataagtgcagggaggaaaagtgcaagtccattatgtaatagtgacagcaaagggaccaggggagaggcattgccttctctgcccacagtctttccgtgtgattgtctttgaatctgaatcagccagtctcagatgccccaaagtttcggttcctatgagcccggggcatgatctgatccccaagacatgtggaggggcagcctgtgcctgcctttgtgtcagaaaaaggaaaccacagtgagcctgagagagacggcgattttcgggctgagaaggcagtagttttcaaaacacatagttaaaaaagaaacaaatgaaaaaaattttagaacagtccagcaaattgctagtcagggtgaattgtgaaattgggtgaagagcttaggattctaatctcatgttttttccttttcacatttttaaaagaacaatgacaaacacccacttatttttcaaggttttaaaacagtctacattgagcatttgaaaggcgtgctagaacaaggtctcctgatccgtccgaggctgcttcccagaggagcagctctccccaggcatttgccaagggaggcggatttccctggtagtgtagctgtgtggctttccttcctgaagagtccgtggttgccctagaacctaacaccccctagcaaaactcacagagctttccgtttttttctttcctgtaaagaaacatttcctttgaacttgattgcctatggatcaaagaaattcagaacagcctgcctgtccccccgcactttttacatatatttgtttcatttctgcagatggaaagttgacatgggtggggtgtccccatccagcgagagagtttcaaaagcaaaacatctctgcagtttttcccaagtaccctgagatacttcccaaagcccttatgtttaatcagcgatgtatataagccagttcacttagacaactttacccttcttgtccaatgtacaggaagtagttctaaaaaaaatgcatattaatttcttcccccaaagccggattcttaattctctgcaacactttgaggacatttatgattgtccctctgggccaatgcttatacccagtgaggatgctgcagtgaggctgtaaagtggccccctgcggccctagcctgacccggaggaaaggatggtagattctgttaactcttgaagactccagtatgaaaatcagcatgcccgcctagttacctaccggagagttatcctgataaattaacctctcacagttagtgatcctgtccttttaacaccttttttgtggggttctctctgacctttcatcgtaaagtgctggggaccttaagtgatttgcctgtaattttggatgattaaaaaatgtgtatatatattagctaattagaaatattctacttctctgttgtcaaactgaaattcagagcaagttcctgagtgcgtggatctgggtcttagttctggttgattcactcaagagttcagtgctcatacgtatctgctcattttgacaaagtgcctcatgcaaccgggccctctctctgcggcagagtccttagtggaggggtttacctggaacattagtagttaccacagaatacggaagagcaggtgactgtgctgtgcagctctctaaatgggaattctcaggtaggaagcaacagcttcagaaagagctcaaaataaattggaaatgtgaatcgcagctgtgggttttaccaccgtctgtctcagagtcccaggaccttgagtgtcattagttactttattgaaggttttagacccatagcagctttgtctctgtcacatcagcaatttcagaaccaaaagggaggctctctgtaggcacagagctgcactatcacgagcctttgtttttctccacaaagtatctaacaaaaccaatgtgcagactgattggcctggtcattggtctccgagagaggaggtttgcctgtgatttgcctgtgatttcctaattatcgctagggccaaggtgggatttgtaaagctttacaataatcattctggatagagtcctgggaggtccttggcagaactcagttaaatctttgaagaatatttgtagttatcttagaagatagcatgggaggtgaggattccaaaaacattttatttttaaaatatcctgtgtaacacttggctcttggtacctgtgggttagcatcaagttctccccagggtagaattcaatcagagctccagtttgcatttggatgtgtaaattacagtaatcccatttcccaaacctaaaatctgtttttctcatcagactctgagtaactggttgctgtgtcataacttcatagatgcaggaggctcaggtgatctgtttgaggagagcaccctaggcagcctgcagggaataacatactggccgttctgacctgttgccagcagatacacaggacatggatgaaattcccgtttcctctagtttcttcctgtagtactcctcttttagatcctaagtctcttacaaaagctttgaatactgtgaaaatgttttacattccatttcatttgtgttgtttttttaactgcattttaccagatgttttgatgttatcgcttatgttaatagtaattcccgtacgtgttcattttattttcatgctttttcagccatgtatcaatattcacttgactaaaatcactcaattaatcaatg

SEQ ID NO: 29 - DNA, 1365 bp, Homo sapiens
  misc_feature: Incyte ID No: 203434.3
ggaatgagtaaaagtgaggcctgtccgtaggagtttaagcttgagaaagtgcagctggaaggggctcagacaccatcttcacctggggtgttatctgaggcccacctgcatcatagttaccatgctgcaaattaaaaacatagcttggagattttccatctctgggagcggggctgggaatctgaatgactttgtgttctgctactgactgacgaaaagttgagctcccagagttgaagtgatttgttccaggtcacacggttagtaggtggagctagtggtgttgaaaccatctaggtctttaggaactggtcaagtgctaggttggggcttcagttgctctgggataccagtgctgatgcccaccatgcagtctggagggtcagcagggcaagcttcatgctgtgaccatgtacagcagctgtagaaactgtttctgggtagggcagtagtatttggcctgtgggttggacagggcaggcctgcttccacccctactaaatgttccctgtactgaggacatggtctccctctgccccatcttgccccaacccccaggatgtggatgctgcctacatgagcaaggtggagctggaggccaaggtggatgccctgaatgatgagatcaacttcctcaggaccctcaatgagacggagttgacagagctgcagtcccagatctccgacacatctgtggtgctgtccatggacaacagtcgctccctggacctggacggcatcatcgctgaggtcaaggcgcagtatgaggagatggccaaatgcagccgggctgaggctgaagcctggtaccagaccaagtttgagaccctccaggcccaggctgggaagcatggggacgacctccggaatacccggaatgagatttcagagatgaaccgggccatccagaggctgcaggctgagatcgacaacatcaagaaccagcgtgccaagttggaggccgccattgccgaggctgaggagcgtggggagctggcgctcaaggatgctcgtgccaagcaggaggagctggaagccgccctgcagcgggccaagcaggatatggcacggcagctgcgtgagtaccaggaactcatgagcgtgaagctggccctggacatcgagatcgccacctaccgcaagctgctggagggcgaggagagccggttggctggagatggagtgggagccgtgaatatctctgtgatgaattccactggtggcagtagcagtggcggtggcattgggctgaccctcgggggaaccatgggcagcaatgccctgagcttctccagcagtgcgggtcctgggctcctgaaggcttattccatccggaccgcatccgccagtcgcaggagtgcccgc

SEQ ID NO: 30 - DNA, 1051 bp, Homo sapiens
  misc_feature: Incyte ID No: 1382961.5
agcaaatgccttctccctgcatgctccctgcaaggcctcctcgctatctccacacacctgactcatcccattttacaggagcagttgatcccaggaagagcattggagcctccagcaggggctgttggggcctgtctgaggagataggatgcgtcaggcagccccagacacgatcacattcctctcaacatgcctgccgggccgggtatccatcccctgcagcagcaggcttcctctacgtggatgttaaaggcccattcagttcatggagagctagcaggtgcgtgctctggaggaggccaacgccgacctggaagtgaagatccgtgactggtaccagaggcagcggcctgctgagatcaaagactacagtccctacttcaagaccattgaggacctgaggaacaagattctcacagccacagtggacaatgccaatgtccttctgcagattgacaatgcccgtctggccgcggatgacttccgcaccaagtatgagacagagttgaacctgcgcatgagtgtggaagccgaccatcaatggcctgcgcagggtgctggacgaactgacctggccagagctgacctggagatgcagattgagagcctgaaggaggagctggcctacctgaagaagaaccacgaggaggagatgaatgccctgagaggccaggtgggtggagatgtcaatgtggagatggacgctgcacctggcgtggacctgagccgcattctgaacgagatgcgtgaccagtatgagaagatggcagagaagaaccgcaaggatgccgaggaatggttcttcaccaagacagaggagctgaaccgcgaggtggccaccaacagcgagctggtgcagagcggcaagagcgagatctcggagctccggcgcaccatgcagaacctggagatgattggcagcgtggaggagcagctggcccagctccgctgcgagatggagcagcagaaccaggagtacaagatcctgctggacgtgaagacgcggctggagcaggagatcgccacctaccgccgcctgctggagggcgag

SEQ ID NO: 31 - DNA, 1645 bp, Homo sapiens
  misc_feature: Incyte ID No: 1382961.3
cctttccaatttacccgagcaccttctcttcactcagccaactgctcgctcgctcacctccctcctctgcaccatgactacctgcagccgccagttcacctcctccagctccatgaagggctcctgcggcatcgggggcggcatcgggggcggctccagccgcatctcctccgtcctggccggagggtcctgccgcgcccccagcacctacgggggcggcctgtctgtctcatcctcccgcttctcctctgggggagcctatgggttggggggcggctatggcggtggcttcagcagcagaaccagcagctttggtagtggctttgggggaggatatggtggtggccttggtgctggcttgggtggtggctttggtggtggctttgctggtggtgatgggcttctggtgggcagtgagaaggtgaccatgcagaacctcaacgaccgcctggcctcctacctggacaaggtgcgtgctctggaggaggccaacgccgacctggaagtgaagatccgtgactggtaccagaggcagcggcctgctgagatcaaagactacagtccctacttcaagaccattgaggacctgaggaacaagattctcacagccacagtggacaatgccaatgtccttctgcagattgacaatgcccgtctggccgcggatgacttccgcaccaagtatgagacagagttgaacctgcgcatgagtgtggaagccgacatcaatggcctgcgcagggtgctggacgaactgaccctggccagagctgacctggagatgcagattgagagcctgaaggaggagctggcctacctgaagaagaaccacgaggaggagatgaatgccctgagaggccaggtgggtggagatgtcaatgtggagatggacgctgcacctggcgtggacctgagccgcattctgaacgagatgcgtgaccagtatgagaagatggcagagaagaaccgcaaggatgccgaggaatggttcttcaccaagacagaggagctgaaccgcgaggtggccaccaacagcgagctggtgcagagcggcaagagcgagatctcggagctccggcgcaccatgcagaacctggagattgagctgcagtcccagctcagcatgaaagcatccctggagaacagcctggaggagaccaaaggtcgctactgcatgcagctggcccagatccaggagatgattggcagcgtggaggagcagctggcccagctccgctgcgagatggagcagcagaaccaggagtacaagatcctgctggacgtgaagacgcggctggagcaggagatcgccacctaccgccgcctgctggagggcgaggacgcccacctctcctcctcccagttctcctctggatcgcagtcatccagagatgtgacctcctccagccgccaaatccgcaccaaggtcatggatgtgcacgatggcaaggtggtgtccacccacgagcaggtccttcgcaccaagaactgaggctgcccagccccgctcaggcctaggaggccccccgtgtggacacagatcccactggaagatcccctctcctgcccaagcacttcacagctggaccctgcttcaccctcaccccctcctggcaatcaatacagcttcattatctgagttgca

SEQ ID NO: 32 - DNA, 2548 bp, Homo sapiens
  misc_feature: Incyte ID No: 1382961.12
  unsure 2494, 2502: a, t, c, g, or other
ggtgtgggctcagccacccccatccaatgacctgactactctcccttctcctcagatcctcacagccaccgtggacaatgccaacatcctgctacagattgacaatgcccgtctggctgctgatgacttccgcaccaagtttgagacagagcaggccctgcgcctgagtgtggaggccgacatcaatggcctgcgcagggtgctggatgagctgaccctggccagagccgacctggagatgcagattgagaacctcaaggaggagctggcctacctgaagaagaaccacgaggaggtgaggtggctggggcagaaggtcaaagatgctgaggagtgggtggcagagccctggggctgggcaatggctgaggccgtgggagagagcagagcaggtgcaccgggattagtcaccttagagggcttccctgtctgcagagccctgatccttggggtccagtgtgcagggcagactcctctttgtaccacactgcttctctgtacacaaggaacctcccaggggcctgcagaggctccctctacctaccctgcctccctcatgagggtgggggataagtaaggaaatcttgtcccatttcaaactctcaaagctgaacatctacatagaagcttggaaattagaggggaacttttgggggcataggcctaataattagattttattttggagagtccttggtctaatgggggagatagagtctgatggtggaggcaatactgagcagatgaataaaaatcatttagagggtcagatagagcagagggagaacaaaggaggggtccttgtgggaagtggggtccccttgtgggggaaggcttgggagtgagaggtcaggatgggtccagatgcgcacatccacatcccctttttccataggagatgaacgccctgcgaggccaggtgggtggtgagatcaatgtggagatggacgctgccccaggcgtggacctgagccgcatcctcaacgagatgcgtgaccagtatgagaagatggcagagaagaaccgcaaggatgccgaggattggttcttcagcaaggtggggggtgctgcaggccagagggctctcttaggggctggggctcaggggccttagcactgacagtaagcccacggccagatgtcttggaggtgcccctcctcagtaagctgcatggaccacagggtcacccactgcatcaacagacatggagctgagctcaagctgggatctggcgggtgggtggggaggtagggagctccctcagaataaaggcagagggtaaagaccttgggagtccccacgtctccctcaagaagtcaggaactagcatcaagagccaggctacatgttctggcttgttctcaagtttccggtctgtgcctcccacacgctgggattaaccataaaaagttaacatttcaaatggcatgtttctgggctttgggatgtgggaagctggtgagaaggcacactctctccacagttagatttgggaggaggcctgacttgggagagggatccaggctcacaccgccctgtcctgtgtcctgtctgcagacagaggaactgaaccgcgaggtggccaccaacagtgagctggtgcagagtggcaagagtgagatctcggagctccggcgcaccatgcaggccttggagatagagctgcagtcccagctcagcatgaaagcatccctggagggcaacctggcggagacagagaaccgctactgcgtgcagctgtcccagatccaggggctgattggcagcgtggaggagcagctggcccagcttcgctgcgagatggagcagcagaaccaggaatacaaaatcctgctggatgtgaagacgcggctggagcaggagattgccacctaccgccgcctgctggagggagaggatgcccacctgactcagtacaagaaagaaccggtgaccacccgtcaggtgcgtaccattgtggaagaggtccaggatggcaaggtcatctcctcccgcgagcaggcggcggtaggtggcaatctcctgctccagccgcgtcttcacatccagcaggattttgtattcctggttctgctgctccatctcgcagcgaagctgggccagctgctcctccacgctgccaatcagccccctggatctgggacagctgcacgcagtagcggttctctgtctccgcccaggttgccctccagggatgctttcatgctgagctgggactgcagctctatctccaaggcctgcatggtgcgccggagctccgagatctcactcttgccactctgcaccagctcactgttggtggccacctcgcggttcagttcctctgtcttgctgaagaaccaatcctcggcatccttgcggttcttctctgccatcttctcatactggtcacgcatctcgttgaggatgcggctcaggtccacgcctggggcagcgtccatctccacattgatctcaccacccacctggcctcgcagggcgttcatctcctanggaaaaangggatgtggatgtgcggatctggacccatcctgacctctcactccc

SEQ ID NO: 33 - DNA, 1804 bp, Homo sapiens
  misc_feature: Incyte ID No: 1382961.15
ttccctaatgcaataaggctctatgggccagcagtggctccagcagggaggccaggaccatgctggagctttcaggaccctgtgcctgcctcctgccgccgccaccatgaccacctccatccgccagttcacctcctccagctccatcaagggctcctccggcctggggggcggctcgtcccgcacctcctgccggctgtctggcggcctgggtgccggctcctgcaggctgggatctgctggcggcctgggcagcaccctcgggggtagcagctactccagctgctacagctttggctctggtggtggctatggcagcagctttgggggtgttgatgggctgctggctggaggtgagaaggccaccatgcagaacctcaatgaccgcctggcctcctacctggacaaggtgcgtgccctggaggaggccaacactgagctggaggtgaagatccgtgactggtaccagaggcaggccccggggcccgcccgtgactacagccagtactacaggacaattgaggagctgcagaacaagatcctcacagccaccgtggacaatgccaacatcctgctacagattgacaatgcccgtctggctgctgatgacttccgcaccaagtttgagacagagcaggccctgcgcctgagtgtggaggccgacatcaatggcctgcgcagggtgctggatgagctgaccctggccagagccgacctggagatgcagattgagaacctcaaggaggagctggcctacctgaagaagaaccacgaggaggagatgaacgccctgcgaggccaggtgggtggtgagatcaatgtggagatggacgctgccccaggcgtggacctgagccgcatcctcaacgagatgcgtgaccagtatgagaagatggcagagaagaaccgcaaggatgccgaggattggttcttcagcaagacagaggaactgaaccgcgaggtggccaccaacagtgagctggtgcagagtggcaagagtgagatctcggagctccggcgcaccatgcaggccttggagatagagctgcagtcccagctcagcatgaaagcatccctggagggcaacctggcggagacagagaaccgctactgcgtgcagctgtcccagatccaggggctgattggcagcgtggaggagcagctggcccagcttcgctgcgagatggagcagcagaaccaggaatacaaaatcctgctggatgtgaagacgcggctggagcaggagattgccacctaccgccgcctgctggagggagaggatgcccacctgactcagtacaagaaagaaccggtgaccacccgtcaggtgcgtaccattgtggaagaggtccaggatggcaaggtcatctcctcccgcgagcaggtccaccagaccacccgctgaggactcagctaccccggccggccacccaggaggcagggaggcagccgccccatctgccccacagtctccggcctctccagcctcagccccctgcttcagtcccttccccatgcttccttgcctgatgacaataaagcttgttgactcagctaaaaaaaaaaaaaaggtcagggaccctctgcctctggcagccttaacctgtcctctgctaggaccagggtgatttcaagccagggaagcaactgggaccctgaaaactgtccctccccagcccgctccccctctctgtgccctggtccccttgctgccatgtggatgctgttgtgattgctgtttgtatattatcaaaatgtttttatattaaaaatgtttggtctgaaaattaaaagcacttcattt

SEQ ID NO: 34 - DNA, 3544 bp, Homo sapiens
  misc_feature: Incyte ID No: 994684.9
cagcgtcaaatttgtctccaccacctcctcctcccggaagagcttcaagagctaagaacctgctgcaagtcactgccttccaagtgcagcaacccagcccatggagattgcctcttctaggcagttgctcaagccatgttttatccttttctggatagcatcatcgctgaggtcaaggcccagtatgaggagattgccaaccgcagccggacagaagccgagtcctggtatcagaccaagtatgaggagctgcagcagacagctggccggcatggcgatgacctccgcaacaccaagcatgagatctctgagatgaaccggatgatccagaggctgagagccgagattgacaatgtcaagaaacagtgcgccaatctgcagaacgccattgcggatgccgagcagcgtggggagctggccctcaaggatgccaggaacaagctggccgagctggaggaggccctgcagaaggccaagcaggacatggcccggctgctgcgtgagtaccaggagctcatgaacaccaagctggccctggacgtggagatcgccacttaccgcaagctgctggagggcgaggaatgcagactcagtggagaaggagttggaccagtcaacatctgtaagtagctttgaacagacattaacaacgacaataatatgggatatatttagtgccaactcagaattctgctgtttctagatccaaacttttcccatcccagcatatggttatttataataatacacttagtaagttgtgggtggtggaggggaaggacagattgggacaggaagcaatgtggcttatgtctcatctcttaaagggtaagccatgcatcctatgcttcttggaccctgtcccctgccttgtccctagtacctagctccccccagtacctagctcctcccctcagtacctagctcccctcagtacctagctccctgtagtacctagctcccctcagtacctagctcctctcagtacctagcaccttgcctcttacactcacccacttttttagggaccttaattaaatgacagttcttccgggccttgtttgctactctgtaaagggggtccagtagagtgctccaacaccagcagatcaaataaatgggccatgcaggatcagcctggcagatggtctcactgagtcctccctcctttccctgcagctgttgtcacaagcagtgtttcctctggatatggcagtggcagtggctatggcggtggcctcggtggaggtcttggcggcggcctcggtggaggtcttgccggaggtagcagtggaagctactactccagcagcagtgggggtgtcggcctaggtggtgggctcagtgtggggggctctggcttcagtgcaagcagtggccgagggctgggggtgggctttggcagtggcgggggtagcagctccagcgtcaaatttgtctccaccacctcctcctcccggaagagcttcaagagctaagaacctgctgcaagtcactgccttccaagtgcagcaacccagcccatggagattgcctcttctaggcagagtcagccttgcgggtgcttgtggagtgggtggctatggcagccggagcctctacaacctggggggctccaagaggatatccatcagcactagtggtggcagcttcaggaaccggtttggtgctggtgctggaggcggctatggctttggaggtggtgccggtagtggatttggtttcggcggtggagctggtggtggctttgggctcggtggcggagctggctttggaggtggcttcggtggccctggctttcctgtctgccctcctggaggtatccaagaggtcactgtcaaccagagtctcctgactcccctcaacctgcaaatcgaccccagcatccagagggtgaggaccgaggagcgcgagcagatcaagaccctcaacaataagtttgcctccttcatcgacaaggtgcggttcctggagcagcagaacaaggttctggaaacaaagtggaccctgctgcaggagcagggcaccaagactgtgaggcagaacctggagccgttgttcgagcagtacatcaacaacctcaggaggcagctggacagcatcgtgggggaacggggccgcctggactcagagctgagaaacatgcaggacctggtggaagacttcaagaacaagtatgaggatgaaatcaacaagcgtaccactgctgagaatgagtttgtgatgctgaagaaggatgtagatgctgcctacatgaacaaggtggagctggaggccaaggttgatgcactgatggatgagattaacttcatgaagatgttctttgatgcggagctgtcccagatgcagacgcatgtctctgacacctcagtggtcctctccatggacaacaaccgcaacctggacctggatagcatcatcgctgaggtcaaggcccagtatgaggagattgccaaccgcagccggaccgaagccgagtcctggtatcagaccaagtatgaggagctgcagcagacagctggccggcatggcgatgacctccgcaacaccaagcatgagatctctgagatgaaccggatgatccagaggctgagagccgagattgacaatgtcaagaaacagtgcgccaatctggcagaacgccattgcggatgccgagcagcgtggggagctggccctcaaggatgccaggaacaagctggccgagctggaggaggccctgcagaaggccaagcaggacatgggcccggctgctgcgtgagtaccaggagctcatgaacaccaagctggccctggacgtggagatcgccacttaccgcaagctgctggagggcgaggaatgcagactcagtggagaaggagttggaccagtcaacatctctgttgtcacaagcagtgtttcctctggatatggcagtggcagtggctatggcggtggcctcggtggaggtcttggcggcggcctcggtggaggtcttgccggaggtagcagtggaagctactactccagcagcagtgggggtgtcggcctaggtggtgggctcagtgtggggggctctggcttcagtgcaagcagtggccgagggctgggggtgggctttggcagtggcgggggtagcagctccagcgtcaaatttgtctccaccacctcctcctcccggaagagcttcaagagctaagaacctgctgcaagtcactgccttccaagtgcagcaacccagcccatggagattgcctcttctaggcagttgctcaagccatgttttatccttttctggagagtagtctagaccaagccaattgcagaaccacattctttggttcccaggagagccccattcccagcccctggtctcccgtgccgcagttctatattctgcttcaaatcagccttcaggtttcccacagcatggcccctgctgacacgagaacccaaagttttcccaaatctaaatcatcaaaacagaatccccaccccaatcccaaattttgttttggttctaactacctccagaatgtgttcaataaaatgcttttatattat

SEQ ID NO: 35 - DNA, 2209 bp, Homo sapiens
  misc_feature: Incyte ID No: 022404.23
cagatgacaagaaaccattcaagtgtttcactcctaaaggttcatctctcaagatagaagagcgagcagaatttttgaataagtctgtgcagaaaagcagtggtgtcaaatcgacccatcaagcagcaatagtctccaagattgacagcagactggagcagtataccagtgcaattgagggaacaaaaagcgcaaaacctacaaagccggcagcctcggatcttcctgttcctgctgaaggtgtacgcaacatcaagagtatgtgggagaaagggaatgtgttttcatcccccactgcagcaggcacaccaaataaggaaactgctggcttgaaggtaggggtttctagccgcatcaatgaatggctaactaaaaccccagatggaaacaagtcacctgctcccaaaccttctgacttgagaccaggagacgtatccagcaagcggaacctctgggaaaagcaatctgtggataaggtcacttcccccactaaggagcctgtttctaaagaaacccatgctgtgaaatagagacttttctactgatcatcataactctgtatctgagcagtgataccaaccacatctgaagtcaacagaagatccaagtttaaaattgcctgcggaatgtgtgcagtatctagaaaaatgaaccgtagtttttgtttttttaaatacagaagtcatgttgtttctgcactttataataaagcatggaagaaattatcttagtaggcattgtaacacttttgaaagtaacccattcagatttgaaatactgccataatggttgtctttaaaaaaaaaaaagaaatgtactgttaaggtattactttttttcatgctgatgattcatatctaaattacattattatgttagctgacagtggtactgattttttaggttggttgttttgtggatttctttagtagtgatagtagcctgaaccacattttagataactcaattatgtatgtatgtgcatacacatatacaaacacactaatggtagaatgcttttttatgtgctagactattatatttagtagtatgtcattgtaactagccaatatcacagcttttgaaaaattaaaaaatcacactatattaatatttcatatttgccaacagaaacatggcagataggtatcaatatgttttcaatgcctgatgacctataagaagaaagtattgaaaagaagagagattagaactgttagaaggagttgaaattttctaaaagacatagtatttagtttataattaaatgcattcttgaagtccagtgtgaattttattaatgctatcatctcgaccaagctcaaagcctacttattagaaacaatgaagttcacaataggtcataaggtctcttccttttctaaaattgaaagacaagaaatttagtgccaatattgtacagacagaaattccatgtatgagtctcaacaaagactacctttggctaaatgtctagaagcagagaagtaaagtgagcaaaatccagtgttgaggagtcatgacagtactttgatctttatatactctgaagcatttcttcaaacttttctacttttgtcattgatacctgtagtaagttgacaatgtggtgaaatttcaaaattatatgtaacttctactagttttactttctcccccaagtcttttttaactcatgatttttacacacacaatccagaacttattatatagcctctaagtctttattcttcacagtagataatgaaagagtcctccagtgtcttggcaaaatgttctagtatagctggatacatacagtggagttctataaactcatacctcagtggacttaaccaaaattgtgttagtctcaattcctaccacactgagggagcctcccaaataactattttcttatctgcagtattcctccagaagagctaaccagggcagggctggcatgagaagtgacatctgcgttacaaagtctatcttcctcataagtctgtaaagagcaattgaatcttctagctttagcaaacctaagccaaaggaaggaaagccacgaagaatgcagaagtcaaaccctcatgacaaagtaggcacaagtctacaataagctaaatcagaatttacaaatacaagtgtcccaggtagcattgactcccgtcattggagtgaaagggggcgtaccgtgtttcattccacaacggattcggaaatcgag

SEQ ID NO: 36 - DNA, 4547 bp, Homo sapiens
  misc_feature: Incyte ID No: 022404.25
ggagcaggctggttttggcagcgtgcacgcagtttcagagctttttaggtcttgggttttctgatgagtgatttcctgagcatgcctagggaatgacaggcatctccacaggcaggctgcatccaccttgggctggggtgtcgtcattggctgcctattagaaaaacgacaggacaatgcataccaccgcctcccgactgtaaacataggggatatgtgttcacttagcatggacttctgggaggggccaaggaagggcggtctggagttttattgaatagagcagtgtgtattcggctgcctgcctgcccgcctgcttgctctctggctgtgctcctgcttaaagaaatcagtccttcctttccgacttagtcctcgggaagaagtttcagactacaaggtatcattggaacatttcaagatcatcaaatcaaattccacagggattggtgaccaaccagaaggctcagacatctgattgctgacctgtccagacatcatctggtctccctgaacctgaaatcacaccatggatgattttgagcgtcgcagagaacttagaaggcaaaagagggaggagatgcgactcgaagcagaaagaatcgcctaccagaggaatgacgatgatgaagaggaggcagcccgggaacggcgccgccgagcccgacaggaacggctgcggcagaagcaggaggaagaatccttgggacaggtgaccgaccaggtggaggtgaatgcccagaacagtgtgcctgacgaggaggccaagacaaccaccacaaacactcaagtggaaggggatgatgaggccgcattcctggagcgcctggctcggcgtgaggaaagacgccaaaaacgccttcaggaggctctggagcggcagaaggagttcgacccaacaataacagatgcaagtctgtcgctcccaagcagaagaatgcaaaatgacacagcagaaaatgaaactaccgagaaggaagaaaaaagtgaaagtcgccaagaaagatacgagatagaggaaacagaaacagtcaccaagtcctaccagaagaatgattggagggatgctgaagaaaacaagaaagaagacaaggaaaaggaggaggaggaagaggagaagccaaagcgagggagcattggagaaaatcagatcaaagatgaaaagattaaaaaggacaaagaacccaaagaagaagttaagagcttcatggatcgaaagaagggatttacagaagttaagtcgcagaatggagaattcatgacccacaaacttaaacatactgagaatactttcagccgccctggagggagggccagcgtggacaccaaggaggctgagggcgccccccagatggaagccggcaaaaggctggaggagcttcgtcgtcgtcgcggggagaccgagagcgaagagttcgagaagctcaaacagaagcagcaggaggcggctttggagctggaggaactcaagaaaaagagggaggagagaaggaaggtcctggaggaggaagagcagaggaggaagcaggaggaagccgatcgaaaactcagagaggaggaagagaagaggaggctaaaggaagagattgaaaggcgaagagcagaagctgctgagaaacgccagaagatgccagaagatggcttgtcagatgacaagaaaccattcaagtgtttcactcctaaaggttcatctctcaagatagaagagcgagcagaatttttgaataagtctgtgcagaaaagcagtggtgtcaaatcgacccatcaagcagcaatagtctccaagattgacagcagactggagcagtataccagtgcaattgagggaacaaaaagcgcaaaacctacaaagccggcagcctcggatcttcctgttcctgctgaaggtgtacgcaacatcaagagtatgtgggagaaagggaatgtgttttcatcccccactgcagcaggcacaccaaataaggaaactgctggcttgaaggtaggggtttctagccgcatcaatgaatggctaactaaaaccccagatggaaacaagtcacctgctcccaaaccttctgacttgagaccaggagacgtatccagcaagcggaacctctgggaaaagcaatctgtggataaggtcacttcccccactaaggtttgagacagttccagaaagaacccaagctcaagacgcaggacgagctcagttgtagagggctaattcgctctgttttgtatttatgttgatttactaaattgggttcattatcttttatttttcaatatcccagtaaacccatgtatattatcactatatttaataatcacagtctagagatgttcatggtaaaagtactgcctttgcacaggagcctgtttctaaagaaacccatgctgtgaaatagagacttttctactgatcatcataactctgtatctgagcagtgataccaaccacatctgaagtcaacagaagatccaagtttaaaattgcctgcggaatgtgtgcagtatctagaaaaatgaaccgtagtttttgtttttttaaatacagaagtcatgttgtttctgcactttataataaagcatggaagaaattatcttagtaggcaattgtaacactttttgaaagtaacccatttcagatttgaaatactgcaataatggttgtctttaaaaaaaaaaaggaaatgtactgttaaggtattactttttttcatgctgatgattcatatctaaattacattattatgttagctgacagtggtactgattttttaggttggttgttttgtggatttctttagtagtgatagtagcctgaaccacattttagataactcaattatgtatgtatgtgcatacacatatacaaacacactaatggtagaatgcttttttatgtgctagactattatatttagtagtatgtcattgtaactagccaatatcacagcttttgaaaaattaaaaaatcacactatattaatatttcatatttgccaacagaaacatggcagataggtatcaatatgttttcaatgcctgatgacctataagaagaaagtattgaaaagaagagagattagaactgttagaaggagttgaaattttctaaaagacatagtatttagtttataattaaatgcattcttgaagtccagtgtgaattttattaatgctatcatctcgaccaagctcaaagcctacttattagaaacaatgaagttcacaataggtcataaggtctcttccttttctaaaattgaaagacaagaaatttagtgccaatattgtacagacagaaattccatgtatgagtctcaacaaagactacctttggctaaatgtctagaagcagagaagtaaagtgagcaaaatccagtgttgaggagtcatgacagtactttgatctttatatactctgaagcatttcttcaaacttttctacttttatttgtcattgatacctgtagtaagttgacaatgtggtgaaatttcaaaattatatgtaacttctactagttttactttctcccccaagtcttttttaactcatgatttttacacacacaatccagaacttattatatagcctctaagtctttattcttcacagtagataatgaaagagtcctccagtgtcttggcaaaatgttctagtatagctggatacatacagtggagttctataaactcatacctcagtggacttaaccaaaattgtgttagtctcaattcctaccacactgagggagcctcccaaataactattttcttatctgcagtattcctccagaagagctaaccagggcagggctggccatgagaagtgacatctgcgttacaaagtctatcttcctcataagtctgtaaagagcaattgaatcttctagctttagcaaacctaagccaaaggaaggaaagccacgaagaatgcagaagtcaaaccctcatgacaaagtaggcacaagtctacaataagctaaatcagaatttacaaatacaagtgtcccaggtagcattgactcccgtcattggagtgaaatggatcaaagtttgaattaaggcctatggtaaggtaacattgctttgttgtacttttgaacaagagctcctcctgatcactattacatatttttctagaaaatctaaagttcagaagagaatgtatcactgctgacttttattccaatatttggatggagtaagttttagggtagaattttgttcagtttggatttaatcttttgaaaagtaaattccttgtttactggtttgactataattctctgttatctttacgaggtaaaactgcaagctgactagcatgttctgtgaatctgccattcctaaaaattttataaacacttgatacttttcactgataatggatcgctccaataaacatatattgtgaaaatgcatccacaataaatggaattccttcctgcaaaatgtctttttctcacttatttttatgtacaatattgatagtgagaggtatgtctattataataaagattatggcacagtaaaacctgtaaaaaaacaaaaaaagg

SEQ ID NO: 37 - DNA, 1402 bp, Homo sapiens
  misc_feature: Incyte ID No: 243937.1
cgggtcgcgcggctcgcgcaggccgccaccgtcgtccgcaaagcctgagtcctgtcctttctctctccccggacagcatgagcttcaccactcgctccaccttctccaccaactaccggtccctgggctctgtccaggcgcccagctacggcgcccggccggtcagcagcgcgggccagcgtctatgcaggcgctgggggctctggttcccggatctccgtgtcccgctccaccagcttcaggggcggcatggggtccgggggcctggccaccgggatagccgggggtctggcaggaatgggaggcatccagaacgagaaggagaccatgcaaagcctgaacgaccgcctggcctcttacctggacagagtgaggagcctggagaccgagaaccggaggctggagagcaaaatccgggagcacttggagaagaagggaccccaggtcagagactggagccattacttcaagatcatcgaggacctgagggctcagatcttcgcaaatactgtggacaatgcccgcatcgttctgcagattgacaatgcccgtcttgctgctgatgactttagagtcaagtatgagacagagctggccatgcgccagtctgtggagaacgacatccatgggctccgcaaggtcattgatgacaccaatatcacacgactgcagctggagacagagatcgaggctctcaaggaggagctgctcttcatgaagaagaaccacgaagaggaagtaaaaggcctacaagcccagattgccagctctgggttgaccgtggaggtagatgcccccaaatctcaggacctcgccaagatcatggcagacatccgggcccaatatgacgagctggctcggaagaaccgagaggagctagacaagtactggtctcagcagattgaggagagcaccacagtggtcaccacacagtctgctgaggttggagctgctgagacgacgctcacagagctgagacgtacagtccagtccttggagatcgacctggactccatgagaaatctgaaggccagcttggagaacagcctgagggaggtggaggcccgctacgccctacagatggagcagctcaacgggatcctgctgcaccttgagtcagagctggcacagacccgggcagagggacagcgccaggcccaggagtatgaggccctgctgaacatcaaggtcaagctggaggctgagatcgccacctaccgccgcctgctggaagatggcgaggactttaatcttggtgatgccttggacagcagcaactccatgcaaaccatccaaaagaccaccacccgccggatagtggatggcaaagtggtgtctgagaccaatgacaccaaagttctgaggcattaagccagcagaagcagggtaccctttggggagc

SEQ ID NO: 38 - DNA, 1585 bp, Homo sapiens
  misc_feature: Incyte ID No: 1382949.25
gaaagcagcctcgagggccaacaacacctgctgtccgtgtccatgcccggttggccaccccgtttctgggggcatgagcttcaccactcgctccaccttctccaccaactaccggtccctgggctctgtccaggcgcccagctacggcgcccggccggtcagcagcgcggccagcgtctatgcaggcgctgggggctctggttcccggatctccgtgtcccgctccaccagcttcaggggcggcatggggtccgggggcctggccaccgggatagccgggggtctggcaggaatgggaggcatccagaacgagaaggagaccatgcaaagcctgaacgaccgcctggcctcttacctggacagagtgaggagcctggagaccgagaaccggaggctggagagcaaaatccgggagcacttggagaagaagggaccccaggtcagagactggagccattacttcaagatcatcgaggacctgagggctcagatcttcgcaaatactgtggacaatgcccgcatcgttctgcagattgacaatgcccgtcttgctgctgatgactttagagtcaagtaagtttgggggctagagagctgggggtccaggggtggagctaagaaggatctgctccccaggctgggtcagttaggggctcacagtgggatcctgttaggtgtgggtggatgagagtcagggtccatcagtgtattcatttaactgttcatttgtataaccccgtttaagaatactgtcctccaagtgccaagaatggtgctcaggggattaccacctaattgctgactcaagttgctggtttgcaatgggcacagaacttctcttagtaggtggcatgagttgagaaggttctggatcagagataggggcccctctgatcacctccactcctataggtatgagacagagctggccatgcgccagtctgtggagaacgacatccatgggctccgcaaggtcattgatgacaccaatatcacacgactgcagctggagacagagatcgaggctctcaaggaggagctgctcttcatgaagaagaaccacgaagaggcaagcaggggccactggccaggccagggattgaggggccaagagaagtctgggtcggagaatagacaagacaaaccaactgcaagtagccttgctaagacgtttagaaatagcagcctgggctcttcttaaataagaccgttctgatgaagagcattctcagggggtcgagtacaccctggctcacctgaattacaggtcaaaatgatatgggttagaaaatgagatgagaacagaagtagaagcagctaacactaggagctgggggtgataaaggaatgacagcagatggagttggcagcgcttcctaaaagatggtagaaggagcaggtttgtgaaggggagggtggataaaggaacagggtgaagttacagagaaaccatcagtgagtgggtggcatttctacccactggagtagaaaggccagaactggcattgccctgagtgcaagccaaggggttcctcctgtctcttctccaactgtagggctcctagaagaggcaatcacagaagaa

SEQ ID NO: 39 - DNA, 980 bp, Homo sapiens
  misc_feature: Incyte ID No: 243933.1
gcctggacagagcaaggagcgtggagaccggaaaccagaagctggagagcaaagcccaggagcacctggagaagaagggaccccaggtcagagactggagccattacttcaagaccatcgaggacctgagggctcagatcttcccaaatactgtggacagtgcctgcatcgttctgcaaatcaacagtgcctgtgttgctgctgatgactttagagtcaagtatgagacagagctggccatgccctagtctgtggagagggacatccatgggctctgcaaggtcactgatgacaccaatgtcactcagcttcagctggagacagagatcaaggctctcaaggaggagctgctcttcctgaagaaaaacctcgaagaggaagtaaaagtcctacaagcccagactgccagctctgggttgaccatggaggtagatgcccccaaatctcaggatctcaccaagatcatggcagacatctgggcccaatatgacgaactggctcagaagaaccaagaggagctggacaagtactagtctcagcagattgaagagagcaccacagtggtcaccatgcagtctgccgaggttggagctgctgcgttgattctcatggagctgagacgtacagtccagttcttggatattgacctggactgcatgagaaatctgaaggccagcttgcagaacagcctgagggaggtggaggcccactacaccctgcagatggggcagatcctgtagactggatcctgctgcacctagagtcagagctggcacagaccctgcagagggacagcgccaggcccaggagtaggaggccctgctgaacatcaaggtcaagctggagactgagatcaccacctactgtcacctgctggaagatggtgaggacttcagtcttggtgataccccagacagcagcaactccaggcaaaccatccagaagaccacctctcccaggatagtggatggcaaagtggt

SEQ ID NO: 40 - DNA, 1760 bp, Homo sapiens
  misc_feature: Incyte ID No: 3355973CB1
ctcctcaccaagcagcagcttctccgctccttctaggatctccgcctggttcggcccgcctgcctccactcctgcctccaccatgtccatcagggtgacccagaagtcctacaaggtgtccacctctggcccccgggccttcagcagccgctcctacacgagtgggcccggttcccgcatcagctcctcgagcttctcccgagtgggcagcagcaactttcgcggtggcctgggcggcggctatggtggggccagcggcatgggaggcatcaccgcagttacggtcaaccagagcctgctgagcccccttgtcctggaggtggaccccaacatccaggccgtgcgcacccaggagaaggagcagatcaagaccctcaacaacaagtttgcctccttcatagacaaggtacggttcctggagcagcagaacaagatgctggagaccaagtggagcctcctgcagcagcagaagacggctcgaagcaacatggacaacatgttcgagagctacatcaacaaccttaggcggcagctggagactctgggccaggagaagctgaagctggaggcggagcttggcaacatgcaggggctggtggaggacttcaagaacaagtatgaggatgagatcaataagcgtacagagatggagaacgaatttgtcctcatcaagaaggatgtggatgaagcttacatgaacaaggtagagctggagtctcgcctggaagggctgaccgacgagatcaacttcctcaggcagctatatgaagaggagatccgggagctgcagtcccagatctcggacacatctgtggtgctgtccatggacaacagccgctccctggacatggacagcatcattgctgaggtcaaggcacagtacgaggatattgccaaccgcagccgggctgaggctgagagcatgtaccagatcaagtatgaggagctgcagagcctggctgggaagcacggggatgacctgcggcgcacaaagactgagatctctgagatgaaccggaacatcagccggctccaggctgagattgagggcctcaaaggccagagggcttccctggaggccgccattgcagatgccgagcagcgtggagagctggccattaaggatgccaacgccaagttgtccgagctggaggccgccctgcagcgggccaagcaggacatggcgcggcagctgcgtgagtaccaggagctgatgaacgtcaagctggccctggacatcgagatcgccacctacaggaagctgctggagggcgaggagagccggctggagtctgggatgcagaacatgagtattcatacgaagaccaccagcggctatgcaggtggtctgagctcggcctatgggggcctcacaagccccggcctcagctacagcctgggctccagctttggctctggcgcgggctccagctccttcagccgcaccagctcctccagggccgtggttgtgaagaagatcgagacacgtgatgggaagctggtgtctgagtcctctgacgtcctgcccaagtgaacagctgcggcagcccctcccagcctacccctcctgcgctgccccagagcctgggaaggaggccgctatgcagggtagcactgggaacaggagacccacctgaggctcagccctagccctcagcccacctggggagtttactacctggggaccccccttgcccatgcctccagctacaaaacaattcaattgctttttttttggtccaaaataaaacctcagctag

SEQ ID NO: 41 - protein, 483 aa, Homo sapiens
  misc_feature: Incyte ID No: 3355973CD1
MSIRVTQKSYKVSTSGPRAFSSRSYTSGPGSRISSSSFSRVGSSNFRGGLGGGYGGASGMGGITAVTVNQSLLSPLVLEVDPNIQAVRTQEKEQIKTLNNKFASFIDKVRFLEQQNKMLETKWSLLQQQKTARSNMDNMFESYINNLRRQLETLGQEKLKLEAELGNMQGLVEDFKNKYEDEINKRTEMENEFVLIKKDVDEAYMNKVELESRLEGLTDEINFLRQLYEEEIRELQSQISDTSVVLSMDNSRSLDMDSIIAEVKAQYEDIANRSRAEAESMYQIKYEELQSLAGKHGDDLRRTKTEISEMNRNISRLQAEIEGLKGQRASLEAAIADAEQRGELAIKDANAKLSELEAALQRAKQDMARQLREYQELMNVKLALDIEIATYRKLLEGEESRLESGMQNMSIHTKTTSGYAGGLSSAYGGLTSPGLSYSLGSSFGSGAGSSSFSRTSSSRAVVVKKIETRDGKLVSESSDVLPK

SEQ ID NO: 42 - DNA, 2310 bp, Homo sapiens
  misc_feature: Incyte ID No: 008513.49
  unsure 2307: a, t, c, g, or other
cttccctctctcctccagcctctcacactctcctcagctctctcatctcctggaaccatggccagcacatccaccaccatcaggagccacagcagcagccgccggggtttcagtgccaacttcagccaggctccctggggtcagccgctctggcttcagcagcgtctccgtgtcccgctccaggggcagtggtggcctgggtggtgcatgtggaggagctggctttggcagccgcagtctgtatggcctggggggctccaagaggatctccattggagggggcagctgtgccatcagtggcggctatggcagcagagccggaggcagctatggctttggtggcgccgggagtggatttggtttcggtggtggagccggcattggctttggtctgggtggtggagccggccttgctggtggctttgggggccctggcttccctgtgtgcccccctggaggcatccaagaggtcaccgtcaaccagagtctcctgactcccctcaacctgcaaatcgatcccaccatccagcgggtgcgggccgaggagcgtgagcagatcaagaccctcaacaacaagtttgcctccttcatcgacaaggtgcggttcctggagcagcagaacaaggttctggaaacaaagtggaccctgctgcaggagcagggcaccaagactgtgaggcagaacctggagccgttgttcgagcagtacatcaacaacctcaggaggcagctggacagcattgtcggggaacggggccgcctggactcagagctcagaggcatgcaggacctggtggaggacttcaagaacaaatatgaggatgaaatcaacaagcgcacagcagcagagaatgaatttgtgactctgaagaaggatgtggatgctgcctacatgaacaaggttgaactgcaagccaaggcagacactctcacagacgagatcaacttcctgagagccttgtatgatgcagagctgtcccagatgcagacccacatctcagacacatctgtggtgctgtccatggacaacaaccgcaacctggacctggacagcatcatcgctgaggtcaaggcccaatatgaggagattgctcagagaagccgggctgaggctgagtcctggtaccagaccaagtacgaggagctgcaggtcacagcaggcagacatggggacgacctgcgcaacaccaagcaggagattgctgagatcaaccgcatgatccagaggctgagatctgagatcgaccacgtcaagaagcagtgcgccaacctgcaggccgccattgctgatgctgagcagcgtggggagatggccctcaaggatgccaagaacaagctggaagggctggaggatgccctgcagaaggccaagcaggacctggcccggctgctgaaggagtaccaggagctgatgaatgtcaagctggccctggacgtggagatcgccacctaccgcaagctgctggagggtgaggagtgcaggctgaatggcgaaggcgttggacaagtcaacatctctgtggtgcagtccaccgtctccagtggctatggcggtgccagtggtgtcggcagtggcttaggcctgggtggaggaagcagctactcctatggcagtggtcttggcgttggaggtggcttcagttccagcagtggcagagccattgggggtggcctcagctctgttggaggcggcagttccaccatcaagtacaccaccacctcctcctccagcaggaagagctataagcactaaagtgcgtctgctagctctcggtcccacagtcctcaggcccctctctggctgcagagccctctcctcaggttgcctttcctctcctggcctccagtctcccctgctgtcccaggtagagctgggtatggatgcttagtgccctcacttcttctctctctctctataccatctgagcacccattgctcaccatcagatcaacctctgattttacatcatgatgtaatcaccactggagcttcactgttactaaattattaatttcttgcctccagtgttctatctctgaggctgagcattataagaaaatgacctctgctccttttcattgcagaaaattgccaggggcttatttcagaacaacttccacttactttccactggctctcaaactctctaacttataagtgttgtgaacccccacccaggcagtatccatgaaagcacaagtgactagtcctatgatgtacaaagcctgtatctctgtgatgatttctgtgctcttcgctgtttgcaattgctaaataaagcagatttataatacaaaaaaaaaaanggg

SEQ ID NO: 43 - DNA, 1864 bp, Homo sapiens
  misc_feature: Incyte ID No: 127987.19
ctctcgctccgaggtccccgcgccagagacgcagccgcgctcccaccacccacacccaccgcgccctgcgttcgcctcttctccgggagccagtccgcgccaccgccgccgcccaggccatgcgccaccctccgcagccatgtccaccaggtccgtgtcctcgtcctcctaccgcaggatgttcggcggcccgggcaccgcgagccggccgagctccagccggagctacgtgactacgtccacccgcacctacagcctgggcagcgcgctgcgccccagcaccagccgcagcctctacgcctcgtccccgggcggcgtgtatgccacgcgctcctctgccgtgcgcctgcggagcagcgtgcccggggtgcggctcctgcaggactcggtggacttctcgctggccgacgccatcaacaccgagttcaagaacacccgcaccaacgagaaggtggagctgcaggagctgaatgaccgcttcgccaactacatcgacaaggtgcgcttcctggagcagcagaataagatcctgctggccgagctcgagcagctcaagggccaaggcaagtcgcgcctgggggacctctacgaggaggagatgcgggagctgcgccggcaggtggaccagctaaccaacgacaaagcccgcgtcgaggtggagcgcgacaacctggccgaggacatcatgcgcctccgggagaaattgcaggaggagatgcttcagagagaggaagccgaaaacaccctgcaatctttcagacaggatgttgacaatgcgtctctggcacgtcttgaccttgaacgcaaagtggaatctttgcaagaagagattgcctttttgaagaaactccacgaagaggaaatccaggagctgcaggctcagattcaggaacagcatgtccaaatcgatgtggatgtttccaagcctgacctcacggctgccctgcgtgacgtacgtcagcaatatgaaagtgtggctgccaagaacctgcaggaggcagaagaatggtacaaatccaagtttgctgacctctctgaggctgccaaccggaacaatgacgccctgcgccaggcaaagcaggagtccactgagtaccggagacaggtgcagtccctcacctgtgaagtggatgcccttaaaggaaccaatgagtccctggaacgccagatgcgtgaaatggaagagaactttgccgttgaagctgctaactaccaagacactattggccgcctgcaggatgagattcagaatatgaaggaggaaatggctcgtcaccttcgtgaataccaagacctgctcaatgttaagatggcccttgacattgagattgccacctacaggaagctgctggaaggcgaggagagcaggatttctctgcctcttccaaacttttcctccctgaacctgagggaaactaatctggattcactccctctggttgatacccactcaaaaaggacacttctgattaagacggttgaaactagagatggacaggttatcaacgaaacttctcagcatcacgatgaccttgaataaaaattgcacacactcagtgcagcaatatattaccagcaagaataaaaaagaaatccatatcttaaagaaacagctttcaagtgcctttctgcagtttttcaggagcgcaagatagatttggaataggaataagctctagttcttaacaaccgacactcctacaagatttagaaaaaagtttacaacataatctagtttacagaaaaatcttgtgctagaatactttttaaaaggtattttgaataccattaaaactgcttttttttttccagcaagtatccaaccaacttggttctgcttcaataaatctttgggaaaaactct

SEQ ID NO: 44 - DNA, 3405 bp, Homo sapiens
  misc_feature: Incyte ID No: 1397781.7
ttgtttcccccactcttccctcctgtggaggagaaaaagtagagggttaacaacgccaggcagggcaccagggcccacagggcgaggacgagcagcatccacacgcagccggagggcagactgcagggagcagagctggcccagcgatcctgggggaggccgcgccagagacgcagccgcgctcccaccacccacacccaccgcgccctgcgttcgcctcttctccgggagccagtcccgcgccaccgccgccgcccaggccatcgccaccctccgcagccatgtccaccaggtccgtgtcctcgtcctcctaccgcaggatgttcggcggcccgggcaccgcgagccggccgagctccagccggagctacgtgactacgtccacccgcacctacagcctgggcagcgcgctgcgccccagcaccagccgcagcctctacgcctcgtccccgggcggcgtgtatgccacgcgctcctctgccgtgcgcctgcggagcagcgtgcccggggtgcggctcctgcaggactcggtggacttctcgctggccgacgccatcaacaccgagttcaagaacacccgcaccaacgagaaggtggagctgcaggagctgaatgaccgcttcgccaactacatcgacaaggtgcgcttcctggagcagcagaataagatcctgctggccgagctcgagcagctcaagggccaaggcaagtcgcgcctgggggacctctacgaggaggagatgcgggagctgcgccggcaggtggaccagctaaccaacgacaaagcccgcgtcgaggtggagcgcgacaacctggccgaggacatcatgcgcctccgggagaaattgcaggaggagatgcttcagagagaggaagccgaaaacaccctgcaatctttcagacaggatgttgacaatgcgtctctggcacgtcttgaccttgaacgcaaagtggaatctttgcaagaagagattgcctttttgaagaaactccacgaagaggaaatccaggagctgcaggctcagattcaggaacagcatgtccaaatcgatgtggatgtttccaagcctgacctcacggctgccctgcgtgacgtacgtcagcaatatgaaagtgtggctgccaagaacctgcaggaggcagaagaatggtacaaatccaagtttgctgacctctctgaggctgccaaccggaacaatgacgccctgcgccaggcaaagcaggagtccactgagtaccggagacaggtgcagtccctcacctgtgaagtggatgcccttaaaggaaccaatgagtccctggaacgccagatgcgtgaaatggaagagaactttgccgttgaagctgctaactaccaagacactattggccgcctgcaggatgagattcagaatatgaaggaggaaatggctcgtcaccttcgtgaataccaagacctgctcaatgttaagatggcccttgacattgagattgccacctacaggaagctgctggaaggcgaggagagcaggatttctctgcctcttccaaacttttcctccctgaacctgagggaaactaatctggattcactccctctggttgatacccactcaaaaaggacacttctgattaagacggttgaaactagagatggacaggttatcaacgaaacttctcagcatcacgatgaccttgaataaaaattgcacacactcagtgcagcaatatattaccagcaagaataaaaaagaaatccatatcttaaagaaacagctttcaagtgcctttctgcagtttttcaggagcgcaagatagatttggaataggaataagctctagttcttaacaaccgacactcctacaagatttagaaaaaagtttacaacataatctagtttacagaaaaatcttgtgctagaatactttttaaaaggtattttgaataccattaaaactgcttttttttttccagcaagtatccaaccaacttggttctgcttcaataaatctttggaaaaacaaagcagttttaatggtattcaaaataccttttaaaaagtattctagcacaagatttttctgtaaactagattatgttgtaaacttttttctaaatcttgtaggagtgtcggttgttaagaactagagcttattcctattccaaatctatcttgcgctcctgaaaaactgcagaaaggcacttgaaagctgtttctttaagatatggatttcttttttattcttgctggtaatatattgctgcactgagtgtgtgcaatttttattcaaggtcatcgtgatgctgagaagtttcgttgataacctgtttaaaaaaaaaaaccaaaataaatataatgccacatgccaaagactaaattatcctatatatcacggcaaataaaaatcctgctaaatatatgtaatttattgtgcaaatcagaaggttatgttgcttctgcatgagtgaaaaactagaaggggcagacacacaagaccctcttccactacaggcaatataaggatccagtggaatgttgtaacttacaaaaagaaatttcttaaaaaactgtgtttataaaagatggtataatagttgtacacaatacagccaagtttaaaagcaattaagacatattaaaatgtgcagcaggtacattttaaatttatgtgcaagggaagatttcatgatgactacaataaattgcaactatttctttcctggcatagggaggtaataagaaactaaatgatcgtatggcacatgcttgtattatatagatgggtttaggaatctataaagtatggaggtaggaagacaccatatgtccaggatcaaaacattcctcatattgaggtagtctagtgaagctgtttcatgtagctgctttaggaagtggtttaaggaagcttactcccacttcaaattaagcaccaaagcaaatcactaattctggagcacaggaagactgctatctcaacttcacatccaggagccaaataattagttggctgtgtgtactgctggaagaagaagcctattctttttttagtaggcatgaatgaaacctgaacctctcaaattagccagctgtatctgagattcagattcactgattttaaaatatatcaactcctgtctgagattaccctattttttccttaaaagataccaacctgtccatctctagtttcaaccgtcttaatcagaagtgtcctttttgagtgggtatcaaccagagggagtgaatccagattagtttctaaataaacaaacaggccaaaaatgagtaaaaacgagttttttcttggaaaaaccaagtaaccattttactgaaacaattatgatttgtgggggagaggcaattgtgtaaagtactactcgccaaataattttagggtagtctctgtttggaaacccaggcc

SEQ ID NO: 45 - DNA, 2602 bp, Homo sapiens
  misc_feature: Incyte ID No: 1397781.12
cgacaacctggccgaggacatcatgcgcctccggggagaaattgcaggaggagatgctttcagagagaggaagcccgaaaacaccctgcaatctttcagacaggatgttgacaaatgcgtctctggcacgtcttgaccttgaacgcaaagtggaatctttgcaagaagagattgcctttttgaagaaactccacgaagaggaaatccgggagctgcaggctcagattcaggaacagcatgtccaaatcgatgtggatgtttccaagcctgacctcacggctgccctgcgtgacgtacgtcagcaatatgaaagtgtggctgccaagaacctgcaggaggcagaagaatggtacaaatccaagtttgctgacctctctgaggctgccaaccggaacaatgacgccctgcgccaggcaaagcaggagtccactgagtaccggagacaggtgcagtccctcacctgtgaagtggatgcccttaaaggaaccaatgagtccctggaacgccagatgcgtgaaatggaagagaactttgccgttgaagctgctaactaccaagacactattggccgcctacaggatgagattcagaatatgaaggaggaaatggctcgtcaccttcgtgaatacctaagacctgctcaatgttaagatggcccttgacattgagattgccacctacaggaagctgctggaaggcgaggagagcaggatttctctgcctcttccaaacttttcctccctgaacctgaggggtaagcattttatttccctttaggaaaaacgtcagctgcttgtaaccactgtgtttatgtcaaagcattcattttttttaggatatctgaaaaaatgccatataagagaaaactctataaaacatctataattttcgaacccaagtacactcttgcattctatgctttaagttaaatgcaaactcctttttccttcttcctgctgcaagtactatctcatcctgatgctcaagagtgtcagggcctgggtttccaaacagagactaccctaaaattatttggcgagtagtactttacacaattgcctctcccccacaaatcataattgtttcagtaaaatggttacttggtttttccaagaaaaaactcgtttttactcatttttggcctgtttgtttatttagaaactaatctggattcactccctctggttgatacccactcaaaaaggacacttctgattaagacggttgaaactagagatggacaggttatcaacgaaacttctcagcatcacgatgaccttgaataaaaattgcacacactcagtgcagcaatatattaccagcaagaataaaaaagaaatccatatcttaaagaaacagctttcaagtgcctttctgcagtttttcaggagcgcaagatagatttggaataggaataagctctagttcttaacaaccgacactcctacaagatttagaaaaaagtttacaacataatctagtttacagaaaaatcttgtgctagaatactttttaaaaggtattttgaataccattaaaacgtattctagcacaagattttcctgtaaactagattatgttgtaaactttttcctaaatcttgtaggagtgtcggttgttaagaactagagcttattcctattccaaatctatcttgcgctcctgaaaaactgcagaaaggcacttgaaagctgtttctttaagatatggatttcttttttattcttgctggtaatatattgctgcactgagtgtgtgcaatttttattcaaggttcatcgtgatgctgagaagtttcgttgataacctgtccatctctagtttcaaccgtcttaatcagaagtgtcctttttgagtggtatcaccagaggagtgatccagttagtttctaaataaacaaacaggccaaaaatgagtaaaaacgagttttttcttggaaaaaccaagtaaccattttactgaaacaattatgatttgtgggggagaggcaattgtgtaaagtactactccccaaataattttagggtagtctctgtttggaaacccaggccctgacactcttgagcatcaggatgagatagtacttgcagcaggaagaaggaaaaaggagtttgcatttaacttaaagcatagaatgcaagagtgtacttgggttcgaaaattatagatgttttatagagttttctcttatatggcattttttcagatatcctaaaaaaaatgaatgctttgacataaacacagtggttacaagcagctgacgtttttcctaaagggaaataaaatgcttacccctcaggtttcagggaggaaaagtttggaagaggcagagaaatcctgctctcctcgccttccagcagcttcctgtaggtggcaatctcaatgtcaagggccatcttaacattgagcaggtcttggtattcacgaaggtgacgagccatttcctccttcatattctgaatctcatcctgcaggcggccaatagtgtcttggtagttagcagcttcaacggcaaagttctcttccatttcacgcatctggcgtccagggactcattctgcagggggtgagaaagatgctggtgtatttctcagaaaaacca

SEQ ID NO: 46 - DNA, 10284 bp, Homo sapiens
  misc_feature: Incyte ID No: 1098479.1
atggggagaagacggaggctgtgtctccagctctacttcctgtggctgggctgtgtggtgctctgggcgcagggcacggccggccagcctcagcctcctccgcccaagccgccccggccccagccgccgccgcaacaggttcggtccgctacagcaggctctgaaggcgggtttctagcgcccgagtatcgcgaggagggtgccgcagtggccagccgcgtccgccggcgaggacagcaggacgtgctccgagggcccaacgtgtgcggctccagattccactcctactgctgccctggatggaagacgctccctggaggaaaccagtgcattgtcccgatttgtagaaatagttgtggagatggattttgttcccgtcctaacatgtgtacttgttccagtgggcaaatatcatcaacctgtggatcaaaatcaattcagcagtgcagtgtgagatgcatgaatggtgggacctgtgcagatgaccactgccagtgccagaaaggatatattggaacttattgtggacaacctgtctgtgaaaatggatgtcagaatggtggacgttgcatcggacccaaccgctgtgcttgtgtttatgggttcactggtccacagtgtgaaagagattacaggacaggcccgtgtttcactcaggtcaacaaccagatgtgccaagggcagctgacaggcattgtctgcacgaagactctgtgctgtgccaccattggacgggcgtggggccatccctgtgagatgtgtccagcccagcctcagccctgccgacggggtttcatccccaacatccgcactggagcttgccaagatgttgatgaatgccaggctatcccagggatatgccaaggaggaaactgtatcaatacagtgggctcttttgaatgcagatgccctgctggtcacaaacagagtgaaactactcagaaatgtgaagacattgatgagtgcagcatcattcctgggatatgtgaaactggtgaatgttccaacaccgtgggaagctatttttgtgtttgtccacgtggatatgtaacctcaacagatggctctcgatgcatcgatcagagaacaggcatgtgtttctcgggcctggtgaatggccgctgtgcacaagagctcccggggagaatgacgaaaatgcagtgctgctgtgagcctggcccgctgctggggcatcggaaccattcctgaagcctgtcctgtcagaggttctgaggaatatcgcagactttgcatggatggacttccaatgggaggaattccagggagtgctggttccagacctggaggcactgggggaaatggctttgccccaagtggcaatggcaatggctatggcccaggagggacaggcttcatccccatccctggaggcaatggcttttctcctggcgttgggggagccggtgtgggggccgggggacagggacctatcatcactggactaacaattctgaaccagacaatagatatctgtaagcatcatgctaacctttgtttaaatggacgctgtataccaactgtctcaagctaccgatgtgaatgcaacatgggttataagcaggatgcaaatggagattgtatagatgttgatgaatgcacatcaaatccctgcactaatggagattgtgttaacacacctggttcctattattgtaaatgtcatgctggattccagaggactcctaccaagcaagcatgcattgatattgatgagtgcatccagaatggggttctttgtaaaaacggtcgatgcgtgaacacagatggaagtttccagtgcatttgcaatgccggctttgaattaactacagatggaaaaaactgtgttgatcatgatgaatgtacaactaccaacatgtgtttgaatggaatgtgcatcaatgaagatggcagcttcaagtgcatctgcaaaccaggatttgtcttggctccaaatgggcgttactgtactgatgttgatgaatgccagaccccaggaatctgcatgaatgggcactgcatcaacagtgaagggtccttccgctgtgactgtcccccaggcctggctgtgggcatggatggacgtgtgtgtgttgatactcacatgcgcagtacctgctatggaggaatcaagaaaggagtgtgtgtgcgtcctttccccggtgcagtgaccaagtccgaatgctgctgtgccaatccagactatggttttggagaaccctgccagccatgccctgcaaaaaattcagctgaattccacggcctttgtagtagtggagtaggtatcactgtggatggaagagatatcaatgaatgtgctttggatcctgatatatgtgccaatgggatttgtgaaaacttacgtggtagttaccgttgtaattgcaacagtggctatgaaccagatgcctctggaagaaactgtattgacattgatgaatgtttagtaaacagactgctttgtgataacggattgtgccgaaacacgccaggaagttacagctgtacgtgcccaccagggtatgtgttcaggactgagacagagacctgtgaaggatataaatgaatgtgaaagcaacccatgtgtcaatggggcctgcagaaacaaccttggatctttcaattgtgaatgttcgcccggcagcaaactcagctccacaggattgatctgtattgacagcctgaaggggacctgttggctcaaacatccaggacagcgctgtgaggtgaatattaatggagccactctgaaatctgaatgctgtgccaccctcggagccgcctgggggagcccctgtgagcggtgtgaactagatacagcttgcccaagagggcttgccaggattaaaggtgttacgtgtgaagatgttaatgagtgtgaggtgttccctggcgtttgtccaaatggacgctgtgtcaacagtaagggatcttttcattgcgagtgccctgaaggccttacgttggatgggactggccgtgtatgtttggatattcgcatggagcagtgttacttgaagtgggatgaagatgaatgcatccaccccgttcctggaaagttccgcatggatgcctgctgctgtgctgtcggggcggcttggggcaccgagtgtgaggagtgccccaaacctggcaccaaggaatacgagacgctgtgcccccgcggggctggctttgctaaccgaggggatgttcttactgggcggccatttacaaagacatcaatgaatgcaaagcatttcctgggatgtgcacttatgggaagtgcagaaatacaatcggaagcttcaaatgccgttgcaatagtggctttgctctagacatggaggaaagaaactgcacggacatcgacgagtgcaggatttctcctgacctctgtggcagtggaatctgcgtcaatacaccgggcagctttgagtgcgagtgcttcgaaggctatgaaagtggcttcatgatgatgaagaactgcatggacattgacgaatgtgaacgtaaccctctcctttgtaggggtggcacctgtgtgaacactgagggcagctttcagtgtgactgcccactgggacacgagctgtcaccatcccgtgaggactgtgtggatattaatgaatgctccctgagtgacaatctctgcagaaatggaaaatgtgtgaacatgattggaacctatcagtgctcttgcaatcctggatatcaggctacgccagaccgccagggctgtacagatattgatgaatgtatgataatgaacggaggctgtgacacccagtgcacaaattcagagggaagctacgaatgcagctgcagtgagggttatgccctgatgccagatgggagatcgtgtgcagacattgatgaatgtgaaaacaatcctgatatctgtgatggcggccagtgtaccaacattcctggagagtatcgctgcctctgctatgatggcttcatggcttccatggacatgaaaacatgcattgatgtcaatgaatgtgacctaaattcaaatatctgcatgtttggggaatgtgagaacacaaagggatccttcatttgccactgtcagctgggttactcagtgaagaaggggaccacaggatgtacagatgtggatgagtgtgaaattggtgctcataactgcgacatgcatgcctcatgtctgaatatcccaggaagcttcaagtgtagctgcagagaaggctggattggaaacggcatcaagtgtattgatctggacgaatgttctaatggaacccaccagtgtagcatcaatgctcagtgtgtaaataccccgggctcataccgctgtgcctgctccgaaggtttcactggtgatggctttacctgctcagatgttgatgagtgtgcagaaaacataaacctctgtgagaacggacagtgccttaatgtcccgggtgcatatcgctgcgagtgtgagatgggcttcactccagcctcagacagcagatcctgccaagatattgatgaatgctccttccaaaacatttgtgtctctggaacatgtaataacctgcctggaatgtttcattgcatctgcgatgatggttatgaattggacagaacaggagggaactgtacagatattgatgagtgtgcagatcctataaactgtgtcaatggcctatgtgtcaacacgcctggtcgctatgagtgtaactgcccacccgattttcagttgaacccaactggtgtgggttgtgttgacaaccgtgtgggcaactgctacctgaagtttggacctcgaggagatgggagtctgtcttgcaacaccgagatcggggtgggcgtcagtcgctcttcatgctgctgctctctgggaaaggcctggggaaacccctgtgagacatgcccccctgtcaatagcactgaatattacaccctgtgtcccggaggtgaaggcttcagacctaaccccatcacaatcattttagaagacattgacgaatgccaggagttaccaggtctctgccagggtggaaactgcatcaacacttttgggagcttccagtgtgagtgcccacaaggctactacctcagcgaggatacccgcatctgtgaagatattgatgagtgttttgcacatcctggtgtgtgtgggcctgggacctgctataacaccctgggaaattacacctgcatttgcccacctgagtacatgcaggtcaatggaggccacaactgcatggacatgagaaaaagcttttgctaccgaagctataatggaaccacttgtgagaatgagttgcctttcaatgtgacaaaaaggatgtgctgctgcacatataatgtgggcaaagcctggaacaaaccttgtgaaccatgcccaactccaggaacagctgactttaaaaccatatgtggaaatattcctggattcacctttgacattcacacaggaaaagctgttgacattgatgaatgtaaagagattccaggcatttgtgcaaatggtgtgtgcattaaccagattggcagtttccgctgtgaatgccctacaggattcagttacaatgacctgctgttggtttgtgaagatatagatgagtgcagcaatggtgataatctctgccagcggaatgcagactgcatcaatagtcctggtagttaccgctgtgaatgtgccgcgggtttcaaactttcacccaatggggcctgtgtagatcgcaatgaatgtttagaaattcctaacgtttgcagtcatggcttgtgtgttgatctgcaaggaagttaccagtgcatctgccacaatggctttaaggcttctcaggaccagaccatgtgcatggatgttgatgagtgcgagcggcacccatgtggaaatggaacttgtaaaaacaccgttggatcctataactgtctgtgctacccagggtttgaactcactcataataatgattgcctggacatagatgagtgcagttccttttttggtcaggtgtgcagaaatggacgttgttttaatgaaattggttctttcaagtgtctatgtaacgaaggttatgaacttaccccagatggcaaaaactgtatagacactaatgagtgtgtcgcccttcccggctcttgctctcctggtacctgtcagaatttggagggatccttcagatgcatctgtcccccagggtatgaagtaaaaagcgagaactgcattgatataaatgaatgtgatgaagatcccaacatttgtctttttggttcctgtactaatactccagggggcttccagtgcctctgcccccctggctttgtactatctgataatggacggagatgctttgatactcgccagagcttctgcttcacaaattttgaaaatggaaagtgttctgtacccaaagctttcaacaccacaaaagcaaaatgctgctgtagtaagatgccaggagagggctggggggacccctgtgagctgtgccccaaagacgatgaagttgcatttcaggatttgtgtccatatggccatggaactgtccctagtcttcatgatacacgtgaagatgtcaatgagtgtcttgagagcccaggcatttgttcaaatggtcaatgtatcaacaccgacggatcttttcgctgtgaatgtccaatgggctacaaccttgactacactggagtacgctgtgtggatactgatgagtgttcaatcggcaatccgtgtggaaatggtacatgcaccaatgttattgggagttttgaatgcaattgcaatgaaggctttgagccagggcccatgatgaattgtgaagatatcaacgaatgtgcccagaacccactgctgtgtgctttccgctgcatgaacacttttgggtcctatgaatgcacgtgcccgattggctatgccctcagggaagatcaaaagatgtgcaaagatctggatgaatgtgctgaagggttacacgactgtgaatctaggggcatggtgtgtaagaatctaatcggcaccttcatgtgcatctgccctcctggaatggcccgaaggcccgatggagaaggctgtgtagatgaaaatgaatgcaggaccaagccaggaatctgtgaaaatggacgttgtgttaacattattggaagctatagatgtgagtgtaatgaaggattccagtcaagttcttcaggcactgaatgccttgacaatcgacagggtctctgctttgcagaggtactgcagacaatatgtcaaatggcatccagcagtcgcaatctcgtcactaagtcagaatgctgctgtgatggtgggcgaggctggggccaccagtgcgagctttgcccacttcctggaactgcccagtacaaaaagatatgtcctcatggcccaggatatacaactgatggaagagatattgatgaatgtaaggtaatgccaaacctctgcaccaatggtcagtgcatcaataccatgggctcattccgatgcttctgcaaggttggctacaccacagacatcagtggaacctcttgtatagaccttgatgaatgctcccagtccccgaaaccatgcaactacatctgcaagaacactgaggggagttatcagtgttcatgtccgagggggtatgtcctgcaagaggatggaaagacatgcaaagaccttgatgaatgtcaaacaaagcagcataactgccagttcctctgtgtcaacaccctgggggggtttacctgtaaatgtccacctggtttcacacagcatcacactgcttgtatcgacaacaacgaatgtgggtctcaaccttcgctttgtggagcaaagggaatctgtcaaaacactccaggcagtttcagctgtgaatgccaaagagggttctctcttgatgccaccggactgaactgtgaagatgttgatgaatgtgatgggaaccacaggtgccaacacggctgccagaacatcctgggtggctacagatgtggctgcccccaaggctacatccagcactaccagtggaatcagtgtgtcgatgagaatgaatgctccaatcccaatgcctgtggctctgcttcctgctacaacaccctggggagttacaagtgcgcctgcccctcggggttctccttcgaccagttctccagtgcctgccacgacgtgaatgagtgctcgtcctccaagaacccctgcaattacggctgctctaacacggaggggggctacctctgtggctgcccccctgggtattacagagtgggacaaggccactgtgtctcaggaatgggatttaacaaggggcagtacctgtcactggatacagaggtcgatgaggaaaatgctctgtccccagaagcatgctacgagtgcaaaatcaacggctattctaagaaagacagcaggcagaagagaagtattcatgaacctgatcccactgctgttgaacagatcagcctagagagtgtcgacatggacagccccgtcaacatgaagttcaacctctcccacctcggctctaaggagcacatcctggaactaaggcccgccatccagcccctcaacaaccacatccgttatgtcatctctcaagggaacgatgacagcgtcttccgcatccaccaaaggaatgggctcagctacttgcacacggccaagaagaagctcatgcccggcacatacacactggaaatcactagcatccctctctacaagaagaaggagcttaagaaactggaagagagcaatgaggatgactacctcctaggggagcttggggaggctctcagaatgaggctgcagattcagctctattaacccttcacagacttgggcccaggctcaaatcctagcacagccagtctgcagaagcatttgaaaagtcaaggactaattttaaagaggaaaaataataataactcttgtttctttcctccctgtcttagactttgaatgttgaccctcacagggagggataatttagactctggtatggccaaagatttgagcacaaaggcaaccgtggttactgtattttttatataacttcattttaaaatatattaaaagaaacctaaatgttcaagatatcagcatatggcactaaatgcacaaaaataatgtgagcttttttttttttcctgttagcagtctgtaacactttgggtattttgctatagttgctaattaaaaaaatatagatgtttatttatttttaatgcagtaatatatggagaaatgaacaaactatgtaaacaaaaagggaaactcacttgtttttctttagatttataaatttgagctattttttttagaggtgctttttaaaaatccaatagatacaagagatgtttcctttggttttctgccagtcatccagctgatacacacctgatgattttaaagaaagccacacagagctgaatgggcagtgtaatcaataatttaaaagacatgaatgtcattagatcctttataacgtagatcgaagccaaagcagctcatttgtgacaacatttcatatcaccagacacaccaggcaacagaagttgaagcacaaccactgtagcaaaataccttgactgcttgtgagaccattagcattgcaggccaaaccgtactgtatttccttctcataacctcaaggaaccatatgtgctacccacaacacctcattcttacccagggtgcgctgcgtcctcatggtactgtaggcagctgaagaaccgccgttcccttgaaagggaacacctggcattctgtggtgtttcgtgctgtcttaaataatggtgcatttattatgttcaagttatttcaggattgccatatgtgcaaacaaatcatgcaatgcagccaaggaatatatgttgttgttgttgttttaaacccattttttttttagaattttcattaatactgtagttatacaccatatgcctcattttatcatagcctattgtgtatgaaagatgtttgtacaatgaattgatgtttagtttgctttagtcatttaaaaagatattgtaccaggatgtgctattaagagcacgtatccattattcttctcaacccaagaacctgtttcctggaccagtgaccaaacctcatatgtgaaatggccaaagcacatgcaggctcctggttgttcctctcaaacctgtgctgaccaaagattagtaaccagttatacccagtattttgaggttttattgtttttttaataactaaaaagaaaaaaggaacagtgtaaatttgtaatcaagagtttgtgaggaaaaacttatggtttttggttttgtttgtttttgtaggtctgtgtatcaaatatgacacttttcttgcaataaagcttattttggggt

SEQ ID NO: 47 - DNA, 461 bp, Homo sapiens
  misc_feature: Incyte ID No: 1098479.5
  unsure 223, 245, 247, 253, 261: a, t, c, g, or other
tatcgctgcgagtgtgagatgggcttcactccagcctcagacagcagatcctgccaaggtgggtcaccaggattccaactcattttcaagttggatcaaccacagtaaatgaaaccacaacaagggctggaacaagctccacctggaagcagaatacatagcacatgcctgcacctataaaagtcattcgtttaagcgtggattattttgccgaaatgaatantgatgatggcggctttcatctntnatgaantttttccntgcccaagaggccagtagttggaagtttggatcattcttttttcttttttaaccatttcttctcttctttctcttttttatcactaaatgaatgacatgtggagaaactattcagcttttaaagtatgctccattacttgtctcaactaccactatttattgtgtttatcaaaatcataaaaagctcatttttggcattt

SEQ ID NO: 48 - DNA, 723 bp, Homo sapiens
  misc_feature: Incyte ID No: 3147519CB1
ccgggactccaacatgcaatgattgccccagatctctgtactacacctgaccactttctgaaatatttgaagccgaggatacaggaagttcttaaaggagcctctctccctactgctgctacacaagaccctgagactgacctgcaggacgaaaccatgaagagcctgatccttcttgccatcctggccgccttagcggtagtaactttgtgttatgaatcacatgaaagcatggaatcttatgaacttaatcccttcattaacaggagaaatgcaaataccttcatatcccctcagcagagatggagagctaaagtccaagagaggatccgagaacgctctaagcctgtccacgagctcaatagggaagcctgtgatgactacagactttgcgaacgctacgccatggtttatggatacaatgctgcctataatcgctacttcaggaagcgccgagggaccaaatgagactgagggaagaaaaaaaatctctttttttctggaggctggcacctgattttgtatccccctgtagcagcattactgaaatacataggcttatatacaatgcttctttcctgtatattctcttgtctggctgcacccctttttcccgcccccagattgataagtaatgaaagtgcactgcagtgagggtcaaaggagagtcaacatatgtgattgttccataataaacttctggtgtgatactttcaaaaaaaa

SEQ ID NO: 49 - protein, 103 aa, Homo sapiens
  misc_feature: Incyte ID No: 3147519CD1
MKSLILLAILAALAVVTLCYESHESMESYELNPFINRRNANTFISPQQRWRAKVQERIRERSKPVHELNREACDDYRLCERYAMVYGYNAAYNRYFRKRRGTK

SEQ ID NO: 50 - DNA, 1364 bp, Homo sapiens
  misc_feature: Incyte ID No: 025731.1
  unsure 1260: a, t, c, g, or other
tctatgaaaatagaagtggggcaattttgtgcttaattccatggtccagatacatcaaaaaatcaatgtgggctgtcaaagaaggtttcttgatagtcatgagtcagcctgattcttgaaaggatatgtggaatataaaattttatttatattccttttgagaaaatactgagaaaaccatcttccctggaaaagagaacgtattgtaaagaaagtacatgaaattgaaggttgaatatccaacatcccccacactgccccagtgtctctgctcccttactgagccttactattattcttcatagccctatcactacctagtctagtattcactgaactgtgtcatccactagaatatgagcataatgagagcagagactacacctgtcggttcagtattctatcctcagcacatagaatggtacctggcacatagcagatgctaaaataaaatttaaatgaataaattaattcaatcaacaccttcaaggtgttattattacctacaactattgtttacaagaggtatgcaccgtggaagatcctggagacacaacaatgaataaagccaagccagttcctgcccccgtggagcttgtagtcaagacattgaacaagtgatcagaaagatgttgactgctgcagcagagggttgcaagctgctcatgagtatataacaagtagccctaaccaaagcattctctcccttggtttaatgtccacccattgaggtgactgctaaatactaatccatgactctatcccttggcattcaaactcacacatccacttacctgcctctccaacctcatctccctccactcacaagagcccatcatattattcatcaaaatgaaactgcacccagttcttctgaacatattactttacaaaactttcatttatgcctggtgactctcatcaggcattcaaaagctttccctcagtgcttcagggctcttccttttcttccctttatacatacacctttatgtatcttcatacgtaccctgcataacctcatatatcttagcatttaccatattctgttgaaaaactgtttccatttctctttacttactagaatgtaaacagatgcacaatgttgagaaaatgaaaagtgacaactttgtttacaagtttagaaattatcagattctcacttaagctctagtctctgtaaagtccacaactactcaataaaagtgaagaaaaatgttaacagagagggaggaatcaaaaacaaagaactatttaaanaaaaaaaaaagcaagtccttgaaacttggagctaatgactgtattagacaagggataagagccaagaagagttgaaaccaagaagggaccaagtagtggctctt

SEQ ID NO: 51 - DNA, 3053 bp, Homo sapiens
  misc_feature: Incyte ID No: 1359783CB1
ctagtattctactagaactggaagattgctctccgagttttgttttgttattttgtttaaaaaataaaaagcttgaggccaaggcaattcatattggctcacaggtatttttgctgtgctgtgcaaggaactctgctagctcaagattcacaatgttgaaagcccttttcctaactatgctgactctggcgctggtcaagtcacaggacaccgaagaaaccatcacgtacacgcaatgcactgacggatatgagtgggatcctgtgagacagcaatgcaaagatattgatgaatgtgacattgtcccagacgcttgtaaaggtggaatgaagtgtgtcaaccactatggaggatacctctgccttccgaaaacagcccagattattgtcaataatgaacagcctcagcaggaaacacaaccagcagaaggaacctcaggggcaaccaccggggttgtagctgccagcagcatggcaaccagtggagtgttgcccgggggtggttttgtggccagtgctgctgcagtcgcaggccctgaaatgcagactggccgaaataactttgtcatccggcggaacccagctgaccctcagcgcattccctccaacccttcccaccgtatccagtgtgcagcaggctacgagcaaagtgaacacaacgtgtgccaagacatagacgagtgcactgcagggacgcacaactgtagagcagaccaagtgtgcatcaatttacggggatcctttgcatgtcagtgccctcctggatatcagaagcgaggggagcagtgcgtagacatagatgaatgtaccatccctccatattgccaccaaagatgcgtgaatacaccaggctcattttattgccagtgcagtcctgggtttcaattggcagcaaacaactatacctgcgtagatataaatgaatgtgatgccagcaatcaatgtgctcagcagtgctacaacattcttggttcattcatctgtcagtgcaatcaaggatatgagctaagcagtgacaggctcaactgtgaagacattgatgaatgcagaacctcaagctacctgtgtcaatatcaatgtgtcaatgaacctgggaaattctcatgtatgtgcccccagggataccaagtggtgagaagtagaacatgtcaagatataaatgagtgtgagaccacaaatgaatgccgggaggatgaaatgtgttggaattatcatggcggcttccgttgttatccacgaaatccttgtcaagatccctacattctaacaccagagaaccgatgtgtttgcccagtctcaaatgccatgtgccgagaactgccccagtcaatagtctacaaatacatgagcatccgatctgataggtctgtgccatcagacatcttccagatacaggccacaactatttatgccaacaccatcaatacttttcggattaaatctggaaatgaaaatggagagttctacctacgacaaacaagtcctgtaagtgcaatgcttgtgctcgtgaagtcattatcaggaccaagagaacatatcgtggacctggagatgctgacagtcagcagtatagggaccttccgcacaagctctgtgttaagattgacaataatagtggggccattttcattttagtcttttctaagagtcaaccacaggcatttaagtcagccaaagaatattgttaccttaaagcactattttatttatagatatatctagtgcatctacatctctatactgatcagatcttgtgagacttattcactaccacaacaatagtatgggggaaactgcccccatgattcaaattatctccctcccacaacacgcgggaattatgggagtacaattcaagaggcgatttgggtggggacacagccaaaccatatcagtgtatatgtagcacattttctttgtggatgtggatccttgagggtggaggaaggagcaagggactgattattttgagttggtggtagagcctggtcgtcaggaaagaccacataggggtgcagcataaactatgacttcagagatggaaaggaattccccagatatgcaggtgaggaaggggacttgtggcaaggtccctgcatgtgtgaaggcatgggacaggagagactatcacttgtattgctcttgggtcttccctccccttccccccgcccttgcctctgtcccagggatccactggggctaaagggatgtcctggggcccagactgctagaggagccatgctacagggtctgttcagcacccccacctgactcctgacgcagagaggtggagaagctcatgggtcagcactgggcttggctgcccatctgaggcctgcaactgtggccagcatggaatgtctatgggaggccatcagctgggacatttagaactcttctgggaggggcgctcttgacccttctggagagcatgtggggaagcagaggagctgctcccctaagccaggaggagctggtgctgagttgtttattgggtgagagttgtgtccaacaccaatgatctttaaatgaactgagtcctagagctgtccggaagactagaactaggaccccggttggagactgcagggagtgcttatagttgacatcggacagggcagctccgttaggaaggagtgtcacctgcactgggaaggttccaaggaagaggttgcctgccttagagaccaagtaccctgataggccagcatcaggctggcctagtacaaagatggtctcgaagcgcccccagggaaatgtgcctccaacaaatcgaagtggataaaaagggcaggacactctaatgagcaccgggcactctctagacatctttttcagattccccctcgctatgaggcaggtctgtctccatcttgcagatgagaatctcagtgaggaggttcaggatcacacagccagtacaggactctggtgccgcgccgtctctaaagcccaccgttcaaccactcgcctgtgctctcagagaggtcggtggaacctgcgggatttctggaaggggagcctgagagagcttcagaagggcgaagactgtca

SEQ ID NO: 52 - protein, 493 aa, Homo sapiens
  misc_feature: Incyte ID No: 1359783CD1
MLKALFLTMLTLALVKSQDTEETITYTQCTDGYEWDPVRQQCKDIDECDIVPDACKGGMKCVNHYGGYLCLPKTAQIIVNNEQPQQETQPAEGTSGATTGVVAASSMATSGVLPGGGFVASAAAVAGPEMQTGRNNFVIRRNPADPQRIPSNPSHRIQCAAGYEQSEHNVCQDIDECTAGTHNCRADQVCINLRGSFACQCPPGYQKRGEQCVDIDECTIPPYCHQRCVNTPGSFYCQCSPGFQLAANNYTCVDINECDASNQCAQQCYNILGSFICQCNQGYELSSDRLNCEDIDECRTSSYLCQYQCVNEPGKFSCMCPQGYQVVRSRTCQDINECETTNECREDEMCWNYHGGFRCYPRNPCQDPYILTPENRCVCPVSNAMCRELPQSIVYKYMSIRSDRSVPSDIFQIQATTIYANTINTFRIKSGNENGEFYLRQTSPVSAMLVLVKSLSGPREHIVDLEMLTVSSIGTFRTSSVLRLTIIVGPFSF

SEQ ID NO: 53 - DNA, 771 bp, Homo sapiens
  misc_feature: Incyte ID No: 410610.1
tgatttcttcacctcctttttaagttttgaagaaaattcacttgctggcaaatattaatagaagcttcttattccaaaatttatctgctgtgctcaggagagtggcagaaagaagaaaacttcggctttgatatcgtttcagttctctctctgaactggcatcgtgcccagggtgagctgtcagctggagctagtggtttctgtggctgccaatttaacacaggttcttaagaggctttcggaaccctcttagaaacctgccctagtaagcccagcagagcaactgccctgtagttctcttgcctggagaaacctggctgtcttctggatccttcttaatcctctttgaccctgttctcaaacaggctctgaataaatcagagaagaaggttctctggagacttctgtacagcacttaaagtgtcttattttgcttgtctgaagacgtcatagcccttgggaaattttagctgaaaatggccactccctccttcaacatcagagaaactaaaatatagagatatccacagcaaggccagagctagagaaaaacctcataaatcctaaattcctgaaatttctaataaccacactgctaaatatattcttcatgtttttagactctttcctcttcttccatccctgtatttaaactatcacagtgtctaaattgataaataataacataatgaatcatggataaatattgatataatgaatcttttttttttaatttcagaatcacatgaaagcatggaatcttatgaactt

SEQ ID NO: 54 - DNA, 746 bp, Homo sapiens
  misc_feature: Incyte ID No: 1382918.40
cacttacaggatagaaacacagaatacttgaacactgaagaatttgaaaatgtcaattctcagaagatcttgaacacttatctccaaatgtgacacagaaacttactgtaataacccctaaaatctgcttgaattacttagcacaagaaaaaaatgaatgcttgagctggctattttgaattgagtcaatttaagattttaaaattcatatgtagcttagaatcagtacatcttactctttggtttatggcaaatcatggtattgatgagacaggaacgaaatgttggatgtacgttaatttcccctacaccttcctcacttcctaaactggtggtgtcttttcttttttttttctcttcctcccccgggtgggaaaaacaggtcttgattccccaactggcattgacttttctgatattactgccaactcttttactgtgcactggattgctcctcgagccaccatcactggctacaggatccgccatcatcccgagcacttcagtgggagacctcgagaagatcgggtgccccactctcggaattccatcaccctcaccaacctcactccaggcacagagtatgtggtcagcatcgttgctcttaatggcagagaggaaagtcccttattgattggccaacaatcaacaggtaacttttcttgtctgcaaagaaactcagaagactttcctacccagttggtagattctgtaaagtagcttgctgttgtctgtcatcagctctc

SEQ ID NO: 55 - DNA, 4108 bp, Homo sapiens
  misc_feature: Incyte ID No: 3615080CB1
tgccagattcctgagacccgcctgcggtggggctacacccagccagggagtctccagaggtgaggctgttgtttaaaaacctggagccgggaggggagacccccacattcaagaggagctttcaggcgatctggagaaagaacggcagaacacacagcaaggaaaggtcctttctggggatcaccccattggctgaagatgagaccattcttcctcttgtgttttgccctgcctggcctcctgcatgcccaacaagcctgctcccgtggggcctgctatccacctgttggggacctgcttgttgggaggacccggtttctccgagcttcatctacctgtggactgaccaagcctgagacctactgcacccagtatggcgagtggcagatgaaatgctgcaagtgtgactccaggcagcctcacaactactacagtcaccgagtagagaatgtggcttcatcctccggccccatgcgctggtggcagtcacagaatgatgtgaaccctgtctctctgcagctggacctggacaggagattccagcttcaagaagtcatgatggagttccaggggcccatgcccgccggcatgctgattgagcgctcctcagacttcggtaagacctggcgagtgtaccagtacctggctgccgactgcacctccaccttccctcgggtccgccagggtcggcctcagagctggcaggatgttcggtgccagtccctgcctcagaggcctgatgcacgcctaaatggggggaaggtccaacttaaccttatggatttagtgtctgggattccagcaactcaaagtcaaaaaattcaagaggtgggggagatcacaaacttgagagtcaatttcaccaggctggcccctgtgccccaaaggggctaccaccctcccagcgcctactatgctgtgtcccagctccgtctgcaggggagctgcttctgtcacggccatgctgatcgctgcgcacccaagcctggggcctctgcaggcccctccaccgctgtgcaggtccacgatgtctgtgtctgccagcacaacactgccggcccaaattgtgagcgctgtgcacccttctacaacaaccggccctggagaccggcggagggccaggacgcccatgaatgccaaaggtgcgactgcaatgggcactcagagacatgtcactttgaccccgctgtgtttgccgccagccagggggcatatggaggtgtgtgtgacaattgccgggaccacaccgaaggcaagaactgtgagcggtgtcagctgcactatttccggaaccggcgcccgggagcttccattcaggagacctgcatctcctgcgagtgtgatccggatggggcagtgccaggggctccctgtgacccagtgaccgggcagtgtgtgtgcaaggagcatgtgcagggagagcgctgtgacctatgcaagccgggcttcactggactcacctacgccaacccgcagggctgccaccgctgtgactgcaacatcctggggtcccggagggacatgccgtgtgacgaggagagtgggcgctgcctttgtctgcccaacgtggtgggtcccaaatgtgaccagtgtgctccctaccactggaagctggccagtggccagggctgtgaaccgtgtgcctgcgacccgcacaactccctcagcccacagtgcaaccagttcacagggcagtgcccctgtcgggaaggctttggtggcctgatgtgcagcgctgcagccatccgccagtgtccagaccggacctatggagacgtggccacaggatgccgagcctgtgactgtgatttccggggaacagagggcccgggctgcgacaaggcatcaggccgctgcctctgccgccctggcttgaccgggccccgctgtgaccagtgccagcgaggctactgcaatcgctacccggtgtgcgtggcctgccacccttgcttccagacctatgatgcggacctccgggagcaggccctgcgctttggtagactccgcaatgccaccgccagcctgtggtcagggcctgggctggaggaccgtggcctggcctcccggatcctagatgcaaagagtaagattgagcagatccgagcagttctcagcagccccgcagtcacagagcaggaggtggctcaggtggccagtgccatcctctccctcaggcgaactctccagggcctgcagctggatctgcccctggaggaggagacgttgtcccttccgagagacctggagagtcttgacagaagcttcaatggtctccttactatgtatcagaggaagagggagcagtttgaaaaaataagcagtgctgatccttcaggagccttccggatgctgagcacagcctacgagcagtcagcccaggctgctcagcaggtctccgacagctcgcgccttttggaccagctcagggacagccggagagaggcagagaggctggtgcggcaggcgggaggaggaggaggcaccggcagccccaagcttgtggccctgaggctggagatgtcttcgttgcctgacctgacacccaccttcaacaagctctgtggcaactccaggcagatggcttgcaccccaatatcatgccctggtgagctatgtccccaagacaatggcacagcctgtggctcccgctgcaggggtgtccttcccagggccggtggggccttcttgatggcggggcaggtggctgagcagctgcggggcttcaatgcccagctccagcggaccaggcagatgattagggcagccgaggaatctgcctcacagattcaatccagtgcccagcgcttggagacccaggtgagcgccagccgctcccagatggaggaagatgtcagacgcacacggctcctaatccagcaggtccgggacttcctaacagaccccgacactgatgcagccactatccaggaggtcagcgaggccgtgctggccctgtggctgcccacagactcagatactgttctgcagaagatgaatgagatccaggccattgcagccaggctccccaacgtggacttggtgctgtcccagaccaagcaggacattgcgcgtgcccgccggttgcaggctgaggctgaggaagccaggagccgagcccatgcagtggagggccaggtggaagatgtggttgggaacctgcggcaggggacagtggcactgcaggaagctcaggacaccatgcaaggcaccagccgctcccttcggcttatccaggacagggttgctgaggttcagcaggtactgcggccagcagaaaagctggtgacaagcatgaccaagcagctgggtgacttctggacacggatggaggagctccgccaccaagcccggcagcagggggcagaggcagtccaggcccagcagcttgcggaaggtgccagcgagcaggcattgagtgcccaagagggatttgagagaataaaacaaaagtatgctgagttgaaggaccggttgggtcagagttccatgctgggtgagcagggtgcccggatccagagtgtgaagacagaggcagaggagctgtttggggagaccatggagatgatggacaggatgaaagacatggagttggagctgctgcggggcagccaggccatcatgctgcgctcagcggacctgacaggactggagaagcgtgtggagcagatccgtgaccacatcaatgggcgcgtgctctactatgccacctgcaagtgatgctacagcttccagcccgttgccccactcatctgccgcctttgcttttggttgggggcagattgggttggaatgctttccatctccaggagactttcatgtagcctaaagtacagcctggaccacccctggtgtgtagctagtaagattaccctgagctgcagctgagcctgagccaatgggacagttacacttgacagacaaagatggtggagattggcatgccattgaaactaagagctctcaagtcaaggaagctgggctgggcagtatcccccgcctttagttctccactggggaggaatcctggaccaagcacaaaaacttaacaaaagtgatgtaaaaatgaaaagccaaataaaaatctttggaaaagaaaaaaaaaaaaaaa

SEQ ID NO: 56 - protein, 1172 aa, Homo sapiens [sequence omitted]

SEQ ID NO: 57 - DNA, 295 bp, Homo sapiens
  misc_feature: Incyte ID No: 108089.1
gggaactaggtcttggccctttctacagcttttctcctgcaaagggtccagccttttcctgctccccacgttgtccttacggctgtgtggggtagggcagggtccacactccttcccatccattttagaggaggaagctggagtctgggaagggatgggattttcccagggcaccctgtgagtcacatgccacttgagacaagggtctagagctccagcattttccaagctacaaatgtatctgctgctccaagtgtccgccagggtcggcctcagagctggcaggagttcggtg

SEQ ID NO: 58 - DNA, 642 bp, Homo sapiens
  misc_feature: Incyte ID No: 231449.1
gaatcacttgccgattttacatttgttcctccccaaaccaaagttataccttgatgtaaccagtgggaggaacttgagctgcttgggtaaataacccagaagaaatgtgatgagagtaggcctgtgagataattttaggaagatctgatggcacagcgtggaagaaaatcaggtttccctacagaatcgctcccaaaagaaaacttattttggttaaatttctggatttaggtagagctgatatcaaaccctcatttggtctgttttatcaagcttggactgcagcagatgtggaactagagattcgtcacagattccagtaacatttaggaaaatgtttggctctgctattccagttcagtagaacaacttcgaaactggatttttctgtagggtgtcatcatcaccctgagatgccaatgtcatctgtgttgttatagtcttgggtctgctttgtgatccaatgagcccaaaagagtaaaatgccctcaaaggattgagaaaaaaaaaaggaaaaaacaaaacaaaggaaaacaaaaccttcccaattgagactttagcagcgttgtttagtgttctaaaaaaaaaagaaaggcaatgaaactaatgagacctgtaaagagaatatgagagagtagggag

SEQ ID NO: 59 - DNA, 176 bp, Homo sapiens
  misc_feature: Incyte ID No: 378497.1
  unsure 18, 30, 35, 39, 44, 52, 87, 93, 108, 112, 114, 151, 166, 168, 170: a, t, c, g, or other
gcccaacgtcatcgggcngcagtgcacccnctgtncaanaggancactacgnattcccacgctgcaaccgtgcagctgtggtcggcncctttntgaagagatgacggngcantnccggcttcccttccccgcacggtcaggccccagtgtnaggtgtgtgagacanantncattca

SEQ ID NO: 60 - DNA, 3679 bp, Homo sapiens
  misc_feature: Incyte ID No: 220943.21
gccgccgccacccgccgcgcccgacacccgggaggccccgccagcccgcgggagaggcccagcgggagtcgcggaacagcaggcccgagcccaccgcgccgggccccggacgccgcgcggaaaagatgaatttacaaccaattttctggattggactgatcagttcagtttgctgtgtgtttgctcaaacagatgaaaatagatgtttaaaagcaaatgccaaatcatgtggagaatgtatacaagcagggccaaattgtgggtggtgcacaaattcaacatttttacaggaaggaatgcctacttctgcacgatgtgatgatttagaagccttaaaaaagaagggttgccctccagatgacatagaaaatcccagaggctccaaagatataaagaaaaataaaaatgtaaccaaccgtagcaaaggaacagcagagaagctcaagccagaggatattactcagatccaaccacagcagttggttttgcgattaagatcaggggagccacagacatttacattaaaattcaagagagctgaagactatcccattgacctctactaccttatggacctgtcttactcaatgaaagacgatttggagaatgtaaaaagtcttggaacagatctgatgaatgaaatgaggaggattacttcggacttcagaattggatttggctcatttgtggaaaagactgtgatgccttacattagcacaacaccagctaagctcaggaacccttgcacaagtgaacagaactgcaccagcccatttagctacaaaaatgtgctcagtcttactaataaaggagaagtatttaatgaacttgttggaaaacagcgcatatctggaaatttggattctccagaaggtggtttcgatgccatcatgcaagttgcagtttgtggatcactgattggctggaggaatgttacacggctgctggtgttttccacagatgccgggtttcactttgctggagatgggaaacttggtggcattgttttaccaaatgatggacaatgtcacctggaaaataatatgtacacaatgagccattattatgattatccttctattgctcaccttgtccagaaactgagtgaaaataatattcagacaatttttgcagttactgaagaatttcagcctgtttacaaggagctgaaaaacttgatccctaagtcagcagtaggaacattatctgcaaattctagcaatgtaattcagttgatcattgatgcatacaattccctttcctcagaagtcattttggaaaacggcaaattgtcagaaggagtaacaataagttacaaatcttactgcaagaacggggtgaatggaacaggggaaaatggaagaaaatgttccaatatttccattggagatgaggttcaatttgaaattagcataacttcaaataagtgtccaaaaaaggattctgacagctttaaaattaggcctctgggctttacggaggaagtagaggttattcttcagtacatctgtgaatgtgaatgccaaagcgaaggcatccctgaaagtcccaagtgtcatgaaggaaatgggacatttgagtgtggcgcgtgcaggtgcaatgaagggcgtgttggtagacattgtgaatgcagcacagatgaagttaacagtgaagacatggatgcttactgcaggaaagaaaacagttcagaaatctgcagtaacaatggagagtgcgtctgcggacagtgtgtttgtaggaagagggataatacaaatgaaatttattctggcaaattctgcgagtgtgataatttcaactgtgatagatccaatggcttaatttgtggaggaaatggtgtttgcaagtgtcgtgtgtgtgagtgcaaccccaactacactggcagtgcatgtgactgttctttggatactagtacttgtgaagccagcaacggacagatctgcaatggccggggcatctgcgagtgtggtgtctgtaagtgtacagatccgaagtttcaagggcaaacgtgtgagatgtgtcagacctgccttggtgtctgtgctgagcataaagaatgtgttcagtgcagagccttcaataaaggagaaaagaaagacacatgcacacaggaatgttcctattttaacattaccaaggtagaaagtcgggacaaattaccccagccggtccaacctgatcctgtgtcccattgtaaggagaaggatgttgacgactgttggttctattttacgtattcagtgaatgggaacaacgaggtcatggttcatgttgtggagaatccagagtgtcccactggtccagacatcattccaattgtagctggtgtggttgctggaattgttcttattggccttgcattactgctgatatggaagcttttaatgataattcatgacagaagggagtttgctaaatttgaaaaggagaaaatgaatgccaaatgggacacgggtgaaaatcctatttataagagtgccgtaacaactgtggtcaatccgaagtatgagggaaaatgagtactgcccgtgcaaatcccacaacactgaatgcaaagtagcaatttccatagtcacagttaggtagctttagggcaatattgccatggttttactcatgtgcaggttttgaaaatgtacaatatgtataatttttaaaatgttttattattttgaaaataatgttgtaattcatgccagggactgacaaaagacttgagacaggatggttattcttgtcagctaaggtcacattgtgcctttttgaccttttcttcctggactattgaaatcaagcttattggattaagtgatatttctatagcgattgaaagggcaatagttaaagtaatgagcatgatgagagtttctgttaatcatgtattaaaactgatttttagctttacaaatatgtcagtttgcagttatgcagaatccaaagtaaatgtcctgctagctagttaaggattgttttaaatctgttattttgctatttgcctgttagacatgactgatgacatatctgaaagacaagtatgttgagagttgctggtgtaaaatacgtttgaaatagttgatctacaaaggccatgggaaaaattcagagagttaggaaggaaaaaccaatagctttaaaacctgtgtgccattttaagagttacttaatgtttggtaacttttatgccttcactttacaaattcaagccttagataaaagaaccgagcaattttctgctaaaaagtccttgatttagcactatttacatacaggccatactttacaaagtatttgctgaatggggaccttttgagttgaatttattttattatttttattttgtttaatgtctggtgctttctatcacctcttctaatcttttaatgtatttgtttgcaattttggggtaagactttttttatgagtactttttctttgaagttttagcggtcaatttgcctttttaatgaacatgtgaagttatactgtggctatgcaacagctctcacctacgcgagtcttactttgagttagtgccataacagaccactgtatgtttacttctcaccatttgagttgcccatcttgtttcacactagtcacattcttgttttaagtgcctttagttttaacagttcactttttacagtgctatttactgaagttatttattaatagc

SEQ ID NO: 61 - DNA, 5681 bp, Homo sapiens
  misc_feature: Incyte ID No: 474630.29
cccgcgcccgccctcggacagtccctgctcgcccgcgcgctgcagccccatctcctagcggcagcccaggcgcggagggagcgagtccgccccgaggtaggtccaggacgggcgcacagcagcagccgaggctggccgggagagggaggaagaggatggcagggccacgccccagcccatgggccaggctgctcctggcagccttgatcagcgtcagcctctctgggaccttggcaaaccgctgcaagaaggccccagtgaagagctgcacggagtgtgtccgtgtggataaggactgcgcctactgcacagacgagatgttcagggaccggcgctgcaacacccaggcggagctgctggccgcgggctgccagcgggagagcatcgtggtcatggagagcagcttccaaatcacagaggagacccagattgacaccaccctgcggcgcagccagatgtccccccaaggcctgcgggtccgtctgcggcccggtgaggagcggcattttgagctggaggtgtttgagccactggagagccccgtggacctgtacatcctcatggacttctccaactccatgtccgatgatctggacaacctcaagaagatggggcagaacctggctcgggtcctgagccagctcaccagcgactacactattggatttggcaagtttgtggacaaagtcagcgtcccgcagacggacatgaggcctgagaagctgaaggagccctggcccaacagtgacccccccttctccttcaagaacgtcatcagcctgacagaagatgtggatgagttccggaataaactgcagggagagcggatctcaggcaacctggatgctcctgagggcggcttcgatgccatcctgcagacagctgtgtgcacgagggacattggctggcgcccggacagcacccacctgctggtcttctccaccgagtcagccttccactatgaggctgatggcgccaacgtgctggctggcatcatgagccgcaacgatgaacggtgccacctggacaccacgggcacctacacccagtacaggacacaggactacccgtcggtgcccaccctggtgcgcctgctcgccaagcacaacatcatccccatctttgctgtcaccaactactcctatagctactacgagaagcttcacacctatttccctgtctcctcactgggggtgctgcaggaggactcgtccaacatcgtggagctgctggaggaggccttcaatcggatccgctccaacctggacatccgggccctagacagcccccgaggccttcggacagaggtcacctccaagatgttccagaagacgaggactgggtcctttcacatccggcggggggaagtgggtatataccaggtgcagctgcgggcccttgagcacgtggatgggacgcacgtgtgccagctgccggaggaccagaagggcaacatccatctgaaaccttccttctccgacggcctcaagatggacgcgggcatcatctgtgatgtgtgcacctgcgagctgcaaaaagaggtgcggtcagctcgctgcagcttcaacggagacttcgtgtgcggacagtgtgtgtgcagcgagggctggagtggccagacctgcaactgctccaccggctctctgagtgacattcagccctgcctgcgggagggcgaggacaagccgtgctccggccgtggggagtgccagtgcgggcactgtgtgtgctacggcgaaggccgctacgagggtcagttctgcgagtatgacaacttccagtgtccccgcacttccgggttcctctgcaatgaccgaggacgctgctccatgggccagtgtgtgtgtgagcctggttggacaggcccaagctgtgactgtcccctcagcaatgccacctgcatcgacagcaatgggggcatctgtaatggacgtggccactgtgagtgtggccgctgccactgccaccagcagtcgctctacacggacaccatctgcgagatcaactactcggcgatccacccgggcctctgcgaggacctacgctcctgcgtgcagtgccaggcgtggggcaccggcgagaagaaggggcgcacgtgtgaggaatgcaacttcaaggtcaagatggtggacgagcttaagagagccgaggaggtggtggtgcgctgctccttccgggacgaggatgacgactgcacctacagctacaccatggaaggtgacggcgcccctgggcccaacagcactgtcctggtgcacaagaagaaggactgccctccgggctccttctggtggctcatccccctgctcctcctcctcctgccgctcctggccctgctactgctgctatgctggaagtactgtgcctgctgcaaggcctgcctggcacttctcccgtgctgcaaccgaggtcacatggtgggctttaaggaagaccactacatgctgcgggagaacctgatggcctctgaccacttggacacgcccatgctgcgcagcgggaacctcaagggccgtgacgtggtccgctggaaggtcaccaacaacatgcagcggcctggctttgccactcatgccgccagcatcaaccccacagagctggtgccctacgggctgtccttgcgcctggcccgcctttgcaccgagaacctgctgaagcctgacactcgggagtgcgcccagctgcgccaggaggtggaggagaacctgaacgaggtctacaggcagatctccggtgtacacaagctccagcagaccaagttccggcagcagcccaatgccgggaaaaagcaagaccacaccattgtggacacagtgctgatggcgccccgctcggccaagccggccctgctgaagcttacagagaagcaggtggaacagagggccttccacgacctcaaggtggcccccggctactacaccctcactgcagaccaggacgcccggggcatggtggagttccaggagggcgtggagctggtggacgtacgggtgcccctctttatccggcctgaggatgacgacgagaagcagctgctggtggaggccatcgacgtgcccgcaggcactgccaccctcggccgccgcctggtaaacatcaccatcatcaaggagcaagccagagacgtggtgtcctttgagcagcctgagttctcggtcagccgcggggaccaggtggcccgcatccctgtcatccggcgtgtcctggacggcgggaagtcccaggtctcctaccgcacacaggatggcaccgcgcagggcaaccgggactacatccccgtggagggtgagctgctgttccagcctggggaggcctggaaagagctgcaggtgaagctcctggagctgcaagaagttgactccctcctgcggggccgccaggtccgccgtttccacgtccagctcagcaaccctaagtttggggcccacctgggccagccccactccaccaccatcatcatcagggacccagatgaactggaccggagcttcacgagtcagatgttgtcatcacagccaccccctcacggcgacctgggcgccccgcagaaccccaatgctaaggccgctgggtccaggaagatccatttcaactggctgcccccttctggcaagccaatggggtacagggtaaagtactggattcagggtgactccgaatccgaagcccacctgctcgacagcaaggtgccctcagtggagctcaccaacctgtacccgtattgcgactatgagatgaaggtgtgcgcctacggggctcagggcgagggaccctacagctccctggtgtcctgccgcacccaccaggaagtgcccagcgagccagggcgtctggccttcaatgtcgtctcctccacggtgacccagctgagctgggctgagccggctgagaccaacggtgagatcacagcctacgaggtctgctatggcctggtcaacgatgacaaccgacctattgggcccatgaagaaagtgctggttgacaaccctaagaaccggatgctgcttattgagaaccttcgggagtcccagccctaccgctacacggtgaaggcgcgcaacggggccggctgggggcctgagcgggaggccatcatcaacctggccacccagcccaagaggcccatgtccatccccatcatccctgacatccctatcgtggacgcccagagcggggaggactacgacagcttccttatgtacagcgatgacgttctacgctctccatcgggcagccagaggcccagcgtctccgatgacactgagcacctggtgaatggccggatggactttgccttcccgggcagcaccaactccctgcacaggatgaccacgaccagtgctgctgcctatggcacccacctgagcccacacgtgccccaccgcgtgctaagcacatcctccaccctcacacgggactacaactcactgacccgctcagaacactcacactcgaccacactgccgagggactactccaccctcacctccgtctcctcccacgactctcgcctgactgctggtgtgcccgacacgcccacccgcctggtgttctctgccctggggcccacatctctcagagtgagctggcaggagccgcggtgcgagcggccgctgcagggctacagtgtggagtaccagctgctgaacggcggtgagctgcatcggctcaacatccccaaccctgcccagacctcggtggtggtggaagacctcctgcccaaccactcctacgtgttccgcgtgcgggcccagagccaggaaggctggggccgagagcgtgagggtgtcatcaccattgaatcccaggtgcacccgcagagcccactgtgtcccctgccaggctccgccttcactttgagcactcccagtgccccaggcccgctggtgttcactgccctgagcccagactcgctgcagctgagctgggagcggccacggaggcccaatggggatatcgtcggctacctggtgacctgtgagatggcccaaggaggagggccagccaccgcattccgggtggatggagacagccccgagagccggctgaccgtgccgggcctcagcgagaacgtgccctacaagttcaaggtgcaggccaggaccactgagggcttcgggccagagcgcgagggcatcatcaccatagagtcccaggatggaggacccttcccgcagctgggcagccgtgccgggctcttccagcacccgctgcaaagcgagtacagcagcatcaccaccacccacaccagcgccaccgagcccttcctagtggatgggctgaccctgggggcccagcacctggaggcaggcggctccctcacccggcatgtgacccaggagtttgtgagccggacactgaccaccagcggaacccttagcacccacatggaccaacagttcttccaaacttgaccgcaccctgccccacccccgccatgtcccactaggcgtcctcccgactcctctcccggagcctcctcagctactccatccttgcacccctgggggcccagcccacccgcatgcacagagcaggggctaggtgtctcctgggaggcatgaagggggcaaggtccgtcctctgtgggcccaaacctatttgtaaccaaagagctgggagcagcacaaggacccagcctttgttctgcacttaataaatggttttgctactgctaaaaa

SEQ ID NO: 62 - DNA, 1887 bp, Homo sapiens
  misc_feature: Incyte ID No: 348070.7
catacattgaaagaagtgttaagaaggactaaatgtgttcctatgtctttatggcagaacaggtttactcaggagaggattatggtttatttcatgttgcattttctttctgaagttgaagtggaattacagacctgaaatagttatgttgttatctttaaatgatattacagatttgctaagactctcattgacttccagaagcatcacagtttctgaaatagttacattagttttgttcagttctccagatttgaaggcagagactcatttttgatgtgtgtgtgtcttctttggttcttagtttaacgctgggtgtgttaacagaattgattgttttgaactcgattgctttgcagatacagtggaaggtcttgatgcccaggttgtaaatggttacatgattcatgatcaggaaagcaaatcagaggttcagattccttaccctctgtcagaaaacaatcaagtgcagagtggaagagctttccatcacggaagattcatcatgagtctccggaaagcagctatggcagagcccaatgcaaagtttattgaaggtgttgtgttacagttattagaggaagatgatgttgtgatgggagttcagtacaaggataaagagactggagatatcaaggaactccatgctccactgactgttgttgcagatgggcttttctccaagttcaggaaaagcctggtctccaataaagtttctgtatcatctcattttgttggctttcttatgaagaatgcaccacagtttaaagcaaatcatgctgaacttattttagctaacccgagtccagttctcatctaccagatttcatccagtgaaactcgagtacttgttgacattagaggagaaatgccaaggaatttaagagaatacatggttgaaaaaatttacccacaaatacctgatcacctgaaagaaccattcttagaagccactgacaattctcatctgaggtccatgccagcaagcttccttcctccttcatcagtgaagaaacgaggtgttcttcttttgggagacgcatataatatgaggcatccacttactggtggaggaatgactgttgcttttaaagatataaaactatggagaaaactgctaaagggtatccctgacctttatgatgatgcagctattttcgaggccaaaaaatcattttactgggcaagaaaaacatctcattcctttgtcgtgaatatccttgctcaggctctttatgaattattttctgccacagatgattccctgcatcaactaagaaaagcctgttttctttatttcaaacttggtggcgaatgtgttgcgggtcctgttgggctgctttctgtattgtctcctaaccctctagttttaattggacacttctttgctgttgcaatctatgccgtgtatttttgctttaagtcagaaccttggattacaaaacctcgagcccttctcagtagtggtgctgtattgtacaaagcgtgttctgtaatatttcctctaatttactcagaaatgaagtatatggttcattaagcttaaaggggaaccatttgtgaatgaatatttggaacttaccaagtcctaagagacttttggaagaggatatatatagcatagtaccataccacttataaagtggaaactcttggaccaagatttggattaatttgtttttgaagttttttgtatataaatatgtaaatacatgctttaatttgcaatttaaaatgaaggggttaaataagttagacatttaaaagaaatgattgttaccataaattagtgctaatgctgaggagaactacagtttttcttttgaatttagtatttgagatgagttgttgggacatgcaaataaaatgaagaattgaaaaatcaaa

SEQ ID NO: 63 - DNA, 392 bp, Homo sapiens
  misc_feature: Incyte ID No: 076047.1
gattgtggtcttgatattaaattaagtgcacctaaagaaaaaaaaattgaataaagcaattctacatgtactaatgtggaatagctgccaagatacattaagtgaaaaaaatcaaagagcaagacagtgtaattttgcatagtaccatttttattttgaaagattatattaatgcttggtatgcgtaaaatagctctggaaggattcaagaaagatctgcttggttacctctgagaaaaggagttagatgttggaaacaggggtgggaggaaaattgtttatattgcataatgtcttttaacgtttggattttgtgttgtggctaaggtagtacctattagaaataaataaaattaggtaattttaaaaataaagaaatgctgtaaattttg

SEQ ID NO: 64 - DNA, 3667 bp, Homo sapiens
  misc_feature: Incyte ID No: 234537.3
gtcgcatgcaaacgtgcgtgagctcggagttcggctcgatgacccgggccccgcccctccagccggggcaccgagccccggccctagctgctcgcccctactcgccggcactcgcccggctcgcccgctttcgcacccagttcacgcgccacagctatgtgtccccgagccgcgcgggcgcccgcgacgctactcctcgccctgggcgcggtgctgtggcctgcggctggcgcctgggagcttacgattttgcacaccaacgacgtgcacagccggctggagcagaccagcgaggactccagcaagtgcgtcaacgccagccgctgcatgggtggcgtggctcggctcttcaccaaggttcagcagatccgccgcgccgaacccaacgtgctgctgctggacgccggcgaccagtaccaggcactatctggttcaccgtgtacaagggcgccgaggtggcgcacttcatgaacgccctgcgctacgatgccatggcactgggaaatcatgaatttgataatggtgtggaaggactgatcgagccactcctcaaagaggccaaatttccaattctgagtgcaaacattaaagcaaaggggccactagcatctcaaatatcaggactttatttgccatataaagttcttcctgttggtgatgaagttgtgggaatcgttggatacacttccaaagaaaccccttttctctcaaatccagggacaaatttagtgtttgaagatgaaatcactgcattacaacctgaagtagataagttaaaaactctaaatgtgaacaaaattattgcactgggacattcgggttttgaaatggataaactcatcgctcagaaagtgaggggtgtggacgtcgtggtgggaggacactccaacacatttctttacacaggcaatccaccttccaaagaggtgcctgctgggaagtacccattcatagtcacttctgatgatgggcggaaggttcctgtagtccaggcctatgcttttggcaaatacctaggctatctgaagatcgagtttgatgaaagaggaaacgtcatctcttcccatggaaatcccattcttctaaacagcagcattcctgaagatccaagcataaaagcagacattaacaaatggaggataaaattggataattattctacccaggaattagggaaaacaattgtctatctggatggctcctctcaatcatgccgctttagagaatgcaacatgggcaacctgatttgtgatgcaatgattaacaacaacctgagacacgcggatgaaatgttctggaaccacgtatccatgtgcattttaaatggaggtggtatccggtcgcccattgatgaacgcaacaatggcacaattacctgggagaacctggctgctgtattgccctttggaggcacatttgacctagtccagttaaaaggttccaccctgaagaaggcctttgagcatagcgtgcaccgctacggccagtccactggagagttcctgcaggtgggcggaatccatgtggtgtatgatctttcccgaaaacctggagacagagtagtcaaattagatgttctttgcaccaagtgtcgagtgcccagttatgaccctctcaaaatggacgaggtatataaggtgatcctcccaaacttcctggccaatggtggagatgggttccagatgataaaagatgaattattaagacatgactctggtgaccaagatatcaacgtggtttctacatatatctccaaaatgaaagtaatttatccagcagttgaaggtcggatcaagttttccacaggaagtcactgccatggaagcttttctttaatatttctttcactttgggcagtgatctttgttttataccaatagccaaaaattctccttgcctttaatgtgtgaaactgcattttttcaagtgagattcaaatctgccttttaggacctggctttgtgacagcaaaaaccatctttacaggctcctagaagctgaaggttagagcattataaaatgaagagacagacatgattactcagggtcagcaacctagtgagttagaaaaaaaattaacatagggccctataaggagaaagccaactatgttaagtttacgtgtccaaattttaatgaaattttactaacaattttaaaccatatttttcttcttcatatccatttctaatccatcaaacagcttatgtttacataaaattttatcattcacaaggaagttttaagcacactgtctcatttgatatccacaacttatttttggtaggaaagagagatgtttttcccaccgtgtcagatgaaaaaacttgaagctcaaaaagggttgacgttgaccatacagctaatgctgacagatccaagacctagacctaggtcttttgaactcaagtccagcattctcaactatatcaagttactgttcagaatacttaatatctcctctcttcataattatcaatagccccaagctcatggatgacaaatctctgctttatttcttgtctctattttttcactttatagctcctgttataatagcaagtttaatggtataaacacaggataccatcctctcttgcaacacccatgtgcctttgatgagtcaggtagcaagctgtagtagataatgagaaaggccagaggctgcaaaagacagtcaaaggacacgagagaaaggaaggggaagaacaggactccaggactgttttatattatagaaaagcaagagctaaagagcatttacacatgttaaacagatacttgttaagcatagtgcctgacacacggcattagctgttattttatgagattccatgcagctctgcctctgtcctctttcttctaacatgaaggtatcatgagaagagaaccttctaacataagctgtaattctaaacctgcacttgtccctctccagcaagaggctagcactgaattcattctactcatactacacacccagttatggaatgtccagagttctcgaagaaaataaatgactttaggaagaggtatacattttttaagtcgctctgcctccaaatctgaacagtcactgtaaatcattcttaagcccagatatgagaacttctgctggaaagtgggaccctctgagtgggtggtcagaaaatacccatgctgatgaaatgacctatgcccaaagaacaaatacttaacgtgggagtggaaccacatgagcctgctcagctctgcataagtaattcaagaaatgggaggcttcaccttaaaaacagtgtgcaaatggcagctagaggttttgataggaagtatgtttgtttcttagtgtttacaaatattaagtactcttgatacaaaatatacttttaaacttcataacctttttataaaagttgttgcagcaaaataatagcctcggttctatgcatatatggattagctataaaaaatgtcaataagattgtacaaggaaaattagagaaaggcacatttagggtttattttttacacttggccagtaaaatagggtaaatcctattagaattttttaaagaactttttttaagtttcctaaatctgtgtgtgtattgtgaagtggtataagaaatgactttgaaccactttgcaattgtagattcccaacaataaaattgaagataagctcttt

SEQ ID NO: 65 - DNA, 1899 bp, Homo sapiens
  misc_feature: Incyte ID No: 014284CB1
atttcaaggcgcgcgcctcgtggtggactcaccgctagcccgcagcgctcggcttcctggtaattcttcacctcttttctcagctccctgcagcatgggtgctgggccctccttgctgctcgccgccctcctgctgcttctctccggcgacggcgccgtgcgctgcgacacacctgccaactgcacctatcttgacctgctgggcacctgggtcttccaggtgggctccagcggttcccagcgcgatgtcaactgctcggttatgggaccacaagaaaaaaaagtagtggtgtaccttcagaagctggatacagcatatgatgaccttggcaattctggccatttcaccatcatttacaaccaaggctttgagattgtgttgaatgactacaagtggtttgccttttttaagtataaagaagagggcagcaaggtgaccacttactgcaacgagacaatgactgggtgggtgcatgatgtgttgggccggaactgggcttgtttcaccggaaagaaggtgggaactgcctctgagaatgtgtatgtcaacacagcacaccttaagaattctcaggaaaagtattctaataggctctacaagtatgatcacaactttgtgaaagctatcaatgccattcagaagtcttggactgcaactacatacatggaatatgagactcttaccctgggagatatgattaggagaagtggtggccacagtcgaaaaatcccaaggcccaaacctgcaccactgactgctgaaatacagcaaaagattttgcatttgccaacatcttgggactggagaaatgttcatggtatcaattttgtcagtcctgttcgaaaccaagcatcctgtggcagctgctactcatttgcttctatgggtatgctagaagcgagaatccgtatactaaccaacaattctcagaccccaatcctaagccctcaggaggttgtgtcttgtagccagtatgctcaaggctgtgaaggcggcttcccataccttattgcaggaaagtacgcccaagattttgggctggtggaagaagcttgcttcccctacacaggcactgattctccatgcaaaatgaaggaagactgctttcgttattactcctctgagtaccactatgtaggaggtttctatggaggctgcaatgaagccctgatgaagcttgagttggtccatcatgggcccatggcagttgcttttgaagtatatgatgacttcctccactacaaaaaggggatctaccaccacactggtctaagagaccctttcaacccctttgagctgactaatcatgctgttctgcttgtgggctatggcactgactcagcctctgggatggattactggattgttaaaaacagctggggcaccggctggggtgagaatggctacttccggatccgcagaggaactgatgagtgtgcaattgagagcatagcagtggcagccacaccaattcctaaattgtagggtatgccttccagtatttcataatgatctgcatcagttgtaaaggggaattggtatattcacagactgtagactttcagcagcaatctcagaagcttacaaatagatttccatgaagatatttgtcttcagaattaaaactgcccttaattttaatatacctttcaatcggccactggccatttttttctaagtattcaattaagtgggaattttctggaagatggtcagctatgaagtaatagagtttgcttaatcatttgtaattcaaacatgctatattttttaaaatcaatgtgaaaacatagacttatttttaaattgtaccaatcacaagaaaataatggcaataattatcaaaacttttaaaatagatgctcatatttttaaaataaagttttaaaaataaaaaa

SEQ ID NO: 66 - protein, 463 aa, Homo sapiens
  misc_feature: Incyte ID No: 014284CD1
MGAGPSLLLAALLLLLSGDGAVRCDTPANCTYLDLLGTWVFQVGSSGSQRDVNCSVMGPQEKKVVVYLQKLDTAYDDLGNSGHFTIIYNQGFEIVLNDYKWFAFFKYKEEGSKVTTYCNETMTGWVHDVLGRNWACFTGKKVGTASENVYVNTAHLKNSQEKYSNRLYKYDHNFVKAINAIQKSWTATTYMEYETLTLGDMIRRSGGHSRKIPRPKPAPLTAEIQQKILHLPTSWDWRNVHGINFVSPVRNQASCGSCYSFASMGMLEARIRILTNNSQTPILSPQEVVSCSQYAQGCEGGFPYLIAGKYAQDFGLVEEACFPYTGTDSPCKMKEDCFRYYSSEYHYVGGFYGGCNEALMKLELVHHGPMAVAFEVYDDFLHYKKGIYHHTGLRDPFNPFELTNHAVLLVGYGTDSASGMDYWIVKNSWGTGWGENGYFRIRRGTDECAIESIAVAATPIPKL

SEQ ID NO: 67 - DNA, 1389 bp, Homo sapiens
  misc_feature: Incyte ID No: 1100429.10
  unsure 1372: a, t, c, g, or other
gctgtttgacatgtgtttcaagccccccaagaaagggtgcttgaaatttaaaattgaactgatgtggcttttcaaaatggaattggaaatgaaaggatattaaattgcagacacccacacaaaagactggtttccactgactaaactgcttttttttgctgatggtagttgaaagtagggagagtaacagcatctcttccagctttttctcttttgttcccttgttttgatgatgggttatttcgggggaagctctggctggccttgctttgtgtcatcttagggataacaaagaggatgaaagagatcaggaaaaccgagaaggcagaacagaaccagcagaaactgtgcttgaggaatgaaaatcacctacacggctccttgtcatatgagactgtggcccagcctcctgcaaaggccatttaagagtaacccagtgaagctgggcaagctggctgtcctgctgcttggccgctcctcagagctgcggccgggagagttcgtggtcgccatcggaagcccgttttcccttcaaaacacagtcaccaccgggaccgtgagcaccacccagcgaggcggcaaagagctggggctccgcaactcagacatggactacatccagcaaagccaaagagctgaaggaccggcaccgggacttcccagacgtgatctcaggagcgtatataattgaagtaattcctgataccccagcagaagctggtggtctcaaggaaaacgacgtcataatcagcatcaatggacagtccgtggtctccgccaatgatgtcagcgacgtcattaaaagggaaagcaccctgaacatggtggtccgcaggggtaatgaagatatcatgatcacagtgattcccgaagaaattgacccataggcagaggcatgagctggacttcatgtttctctcaaagactctcccgtggatgacggatgaggactctgggctgctggaataggacactcaagacttttgactgccattttgtttgttcagtggagactccctggccaacagaatccttcttgatagttgcaggcaaaacaaatgtaatgttgcagatccgcaggcagaagctctgcccttctgtatcctatgtatgcagtgtgctttttcttgccagcttgggccattcttgcttagacagtcagcatttgtctcctcctttaactgagtcatcatcttagtccaactaatgcagtcgatacaatgcgtagatagaagaagccccacgggagccaggatgggactggtcgtgtttgtgcttttctccaagtcagcacccaaaggtcaatgcacagagaccccgggtgggtgagcgctggcttctcaaacggccgaagttgcctcttttaggaatntctttggaattgggagc

SEQ ID NO: 68 - DNA, 1773 bp, Homo sapiens
  misc_feature: Incyte ID No: 990647.5
ggcggagtcaggcgcccgcgcgtgggccccgcccccttatgtcgggtataaagcccctcccgctcacagtttccctagtcctcgaaggctcggaagcccgtcaccatgtcgtgcgagtcgtctatggttctcgggtactgggatattcgtgggctggcgcacgccatccgcctgctcctggagttcacggatacctcttatgaggagaaacggtacacgtgcggggaagctcctgactatgatcgaagccaatggctggatgtgaaattcaagctagacctggactttcctaatctgccctacctcctggatgggaagaacaagatcacccagagcaatgccatcttgcgctacatcgctcgcaagcacaacatgtgtggtgagactgaagaagaaaagattcgagtggacatcatagagaaccaagtaatggatttccgcacacaactgataaggctctgttacagctctgaccacgaaaaactgaagcctcagtacttggaagagctacctggacaactgaaacaattctccatgtttctggggaaattctcatggtttgccggggaaaagctcacctttgtggattttctcacctatgatatcttggatcagaaccgtatatttgaccccaagtgcctggatgagttcccaaacctgaaggctttcatgtgccgttttgaggctttggagaaaatcgctgcctacttacagtctgatcagttctgcaagatgcccatcaacaacaagatggcccagtggggcaacaagcctatatgctgagcaggaggcagacttgcagagcttgttttgtttcatcctgtccgtaaggggtcagcgctcttgctttgctcttttcaatgaatagcacttatgttactggtgtccagctgagtttctcttgggtataaaggctaaaagggaaaaaggatatgtggagaatcatcaagatatgaattgaatcgctgcgatactggcatttccctactccccaactgagttcaagggctgtaggttcatgcccaagccctgagagtgggtactagaaaaaacgagattgcacagttggagagagcaggtgtgttaaatgggactggagtccctgtgaagactgggtgaggataacacaagtaaaactgtggtactgatggacttaaccggagttcggaaaccgtcctgtgtacacatgggagtttagtgtgataaaggcagtatttcagactggtgggctagccaatagagttgggacaattgcttactcattaaaaataatagagccccacttgacactattcactaaaattaatctggaatttaaggcccaacattaaacacaaagctgttgaaatattgatgaaaatgtaagaatttttgtgaccacggggtaggagaagtttctttaaagacgtccaaagaacaaaaccataggctgctctgcctgtggagtaaccattctttattcttctactttttaaaatgaataacaatcacaaaggaaagatttgccaattgaataggactcaaattctacaacttttcctaaggcacccacaaataatgacaagtgagacaaaaagcactagtataaagattatataaagacctataaatcattaagacaactgagtttttaaaaatggacaaaatccatgaacaatttataaaatagaaatatagccaaaaatgtctaaaagatgtttatgatgtaaggaattatcaattacaacagtgagaaaccatatttccttctatccgatgagtaaaaagtttcta

SEQ ID NO: 69 - DNA, 800 bp, Homo sapiens
  misc_feature: Incyte ID No: 347492.1
ctctcctccagcaaggtcaggacttcaggactgaaacaatgaccgataaaacagagaaggtggctgtagatcctgaaactgtgtttaaacgtcccagggaatgtgacagtccttcgtatcagaaaaggcagaggatggccctgttggcaaggaaacaaggagcaggagacagccttattgcaggctctgccatgtccaaagaaaagaagcttatgacaggacatgctattccacccagccaattggattctcagattgatgacttcactggtttcagcaaagataggatgatgcagaaacctggtagcaatgcacctgtgggaggaaacgttaccagcagtttctctggagatgacctagaatgcagagaaacagcctcctctcccaaaagccaacgagaaattaatgctgatataaaacgtaaattagtgaaggaactccgatgcgttggacaaaaatatgaaaaaatcttcgaaatgcttgaaggagtgcaaggacctactgcagtcaggaagcgattttttgaatccatcatcaaggaagcagcaagatgtatgagacgagactttgttaagcaccttaagaagaaactgaaacgtatgatttgagaatacttgtccctggaggattatcacaccccaaatgcataatctcgttaatgattgaggagagaaaaggatcagattgctgttttctacaatggagcaggatattgctgaagtctcctggcatatgttaccgaatcaaatagccttccagaggctaagaaatttctgttagtaaaagatgttctttttccc

SEQ ID NO: 70 - DNA, 3156 bp, Homo sapiens
  misc_feature: Incyte ID No: 2733282CB1
gttcaggaagaaaccatctgcatccatattgaaaacctgacacaatgtatgcagcaggctcagtgtgagtgaactggaggcttctctacaacatgacccaaaggagcattgcaggtcctatttgcaacctgaagtttgtgactctcctggttgccttaagttcagaactcccattcctgggagctggagtacagcttcaagacaatgggtataatggattgctcattgcaattaatcctcaggtacctgagaatcagaacctcatctcaaacattaaggaaatgataactgaagcttcattttacctatttaatgctaccaagagaagagtatttttcagaaatataaagattttaatacctgccacatggaaagctaataataacagcaaaataaaacaagaatcatatgaaaaggcaaatgtcatagtgactgactggtatggggcacatggagatgatccatacaccctacaatacagagggtgtggaaaagagggaaaatacattcatttcacacctaatttcctactgaatgataacttaacagctggctacggatcacgaggccgagtgtttgtccatgaatgggcccacctccgttggggtgtgttcgatgagtataacaatgacaaacctttctacataaatgggcaaaatcaaattaaagtgacaaggtgttcatctgacatcacaggcatttttgtgtgtgaaaaaggtccttgcccccaagaaaactgtattattagtaagctttttaaagaaggatgcacctttatctacaatagcacccaaaatgcaactgcatcaataatgttcatgcaaagttatctctgtggtgaaatttgtaatgccagtacccacaaccaagaagcaccaaacctacagaaccagatgtgcagcctcagaagtgcatgggatgtaatcacagactctgctgactttcaccacagctttcccatgaacgggactgagcttccacctcctcccacattctcgcttgtagaggctggtgacaaagtggtctgtttagtgctggatgtgtccagcaagatggcagaggctgacagactccttcaactacaacaagccgcagaattttatttgatgcagattgttgaaattcataccttcgtgggcattgccagtttcgacagcaaaggagagatcagagcccagctacaccaaattaacagcaatgatgatcgaaagttgctggtttcatatctgcccaccactgtatcagctaaaacagacatcagcatttgttcagggcttaagaaaggatttgaggtggttgaaaaactgaatggaaaagcttatggctctgtgatgatattagtgaccagcggagatgataagcttcttggcaattgcttacccactgtgctcagcagtggttcaacaattcactccattgccctgggttcatctgcagccccaaatctggaggaattatcacgtcttacaggaggtttaaagttctttgttccagatatatcaaactccaatagcatgattgatgctttcagtagaatttcctctggaactggagacattttccagcaacatattcagcttgaaagtacaggtgaaaatgtcaaacctcaccatcaattgaaaaacacagtgactgtggataatactgtgggcaacgacactatgtttctagttacgtggcaggccagtggtcctcctgagattatattatttgatcctgatggacgaaaatactacacaaataattttatcaccaatctaacttttcggacagctagtctttggattccaggaacagctaagcctgggcactggacttacaccctgaacaatacccatcattctctgcaagccctgaaagtgacagtgacctctcgcgcctccaactcagctgtgcccccagccactgtggaagcctttgtggaaagagacagcctccattttcctcatcctgtgatgatttatgccaatgtgaaacagggattttatcccattcttaatgccactgtcactgccacagttgagccagagactggagatcctgttacgctgagactccttgatgatggagcaggtgctgatgttataaaaaatgatggaatttactcgaggtattttttctcctttgctgcaaatggtagatatagcttgaaagtgcatgtcaatcactctcccagcataagcaccccagcccactctattccagggagtcatgctatgtatgtaccaggttacacagcaaacggtaatattcagatgaatgctccaaggaaatcagtaggcagaaatgaggaggagcgaaagtggggctttagccgagtcagctcaggaggctccttttcagtgctgggagttccagctggcccccaccctgatgtgtttccaccatgcaaaattattgacctggaagctgtaaaagtagaagaggaattgaccctatcttggacagcacctggagaagactttgatcagggccaggctacaagctatgaaataagaatgagtaaaagtctacagaatatccaagatgactttaacaatgctattttagtaaatacatcaaagcgaaatcctcagcaagctggcatcagggagatatttacgttctcaccccaaatttccacgaatggacctgaacatcagccaaatggagaaacacatgaaagccacagaatttatgttgcaatacgagcaatggataggaactccttacagtctgctgtatctaacattgcccaggcgcctctgtttattccccccaattctgatcctgtacctgccagagattatcttatattgaaaggagttttaacagcaatgggtttgataggaatcatttgccttattatagttgtgacacatcatactttaagcaggaaaaagagagcagacaagaaagagaatggaacaaaattattataaataaatatccaaagtgtcttccttcttagatataagacccatggccttcgactacaaaaacatactaacaaagtcaaattaacatcaaaactgtattaaaatgcattgagtttttgtacaatacagataagatttttacatggtagatcaacaaattctttttgggggtagattagaaaacccttacactttggctatgaacaaataataaaaattattctttaaaaaaaaaaaa

SEQ ID NO: 71 - protein, 942 aa, Homo sapiens
  misc_feature: Incyte ID No: 2733282CD1
MTQRSIAGPICNLKFVTLLVALSSELPFLGAGVQLQDNGYNGLLIAINPQVPENQNLISNIKEMITEASFYLFNATKRRVFFRNIKILIPATWKANNNSKIKQESYEKANVIVTDWYGAHGDDPYTLQYRGCGKEGKYIHFTPNFLLNDNLTAGYGSRGRVFVHEWAHLRWGVFDEYNNDKPFYINGQNQIKVTRCSSDITGIFVCEKGPCPQENCIISKLFKEGCTFIYNSTQNATASIMFMQSYLCGEICNASTHNQEAPNLQNQMCSLRSAWDVITDSADFHHSFPMNGTELPPPPTFSLVEAGDKVVCLVLDVSSKMAEADRLLQLQQAAEFYLMQIVEIHTFVGIASFDSKGEIRAQLHQINSNDDRKLLVSYLPTTVSAKTDISICSGLKKGFEVVEKLNGKAYGSVMILVTSGDDKLLGNCLPTVLSSGSTIHSIALGSSAAPNLEELSRLTGGLKFFVPDISNSNSMIDAFSRISSGTGDIFQQHIQLESTGENVKPHHQLKNTVTVDNTVGNDTMFLVTWQASGPPEIILFDPDGRKYYTNNFITNLTFRTASLWIPGTAKPGHWTYTLNNTHHSLQALKVTVTSRASNSAVPPATVEAFVERDSLHFPHPVMIYANVKQGFYPILNATVTATVEPETGDPVTLRLLDDGAGADVIKNDGIYSRYFFSFAANGRYSLKVHVNHSPSISTPAHSIPGSHAMYVPGYTANGNIQMNAPRKSVGRNEEERKWGFSRVSSGGSFSVLGVPAGPHPDVFPPCKIIDLEAVKVEEELTLSWTAPGEDFDQGQATSYEIRMSKSLQNIQDDFNNAILVNTSKRNPQQAGIREIFTFSPQISTNGPEHQPNGETHESHRIYVAIRAMDRNSLQSAVSNIAQAPLFIPPNSDPVPARDYLILKGVLTAMGLIGIICLIIVVTHHTLSRKKRADKKENGTKLL

SEQ ID NO: 72 - DNA, 425 bp, Homo sapiens
  misc_feature: Incyte ID No: 255161.1
gctgtaaaaagctttatttccatttggtctaaggcttgggagagggctctagagttggtttaaaaaagctgcctagtggctggagggagaggcttaggcagagcggggctcttcagatgtcgctgggttcggtaggctcccgtgtgcctgagggtgaacctttttgcccagcccggcctggaggccggctggcctgtgaaggttggtcaggtggtcacctatcttcttgatgagttttactttttcatctaggaagtggctctccaggaagtcacagatatgggggtctgtgcaggtggaacccaaggcatgaagatccaaaagggtccagttcaggttcttctccagggccagagtgacttccatcgcacccagggttttaccccattcatctttacatggcttctggatgtccgggaagacag

SEQ ID NO: 73 - DNA, 1362 bp, Homo sapiens
  misc_feature: Incyte ID No: 995874.18
ggtgtatttggattctcccggggccccgccccctcctccctccttgcagagccggcgccggaggagacgcacgcagctgactttgtcttctccgcacgactgttacagaggtctccagagccttctctctcctgtgcaaaatggcaactcttaaggaaaaactcattgcaccagttgcggaagaagaggcaacagttccaaacaataagatcactgtagtgggtgttggacaagttggtatggcgtgtgctatcagcattctgggaaagtctctggctgatgaacttgctcttgtggatgttttggaagataagcttaaaggagaaatgatggatctgcagcatgggagcttatttcttcagacacctaaaattgtggcagataaagattattctgtgaccgccaattctaagattgtagtggtaactgcaggagtccgtcagcaagaaggggagagtcggctccaatctggtgcagagaaatgttaatgtcttcaaattcattattcctcagatcgtcaagtacagtcctgattgcatcataattgtggtttccaacccagtggacattcttacgtatgttacctggaaactaagtggattacccaaacaccgcgtgattggaagtggatgtaatctggattctgctagatttcgctaccttatggctgaaaaacttggcattcatcccagcagctgccatggatggattttgggggaacatggcgactcaagtgtggctgtgtggagtggtgtgaatgtggcaggtgtttctctccaggaattgaatccagaaatgggaactgacaatgatagtgaaaattggaaggaagtgcataagatggtggttgaaagtgcctatgaagtcatcaagctaaaaggatataccaactgggctattggattaagtgtggctgatcttattgaatccatgttgaaaaatctatccaggattcatcccgtgtcaacaatggtaaaggggatgtatggcattgagaatgaagtcttcctgagccttccatgtatcctcaatgcccggggattaaccagcgttatcaaccagaagctaaaggatgatgaggttgctcagctcaagaaaagtgcagataccctgtgggacatccagaaggacctaaaagacctgtgactagtgagctctaggctgtagaaatttaaaaactacaatgtgattaactcgagcctttagttttcatccatgtacatggatcacagtttgctttgatcttcttcaatatgtgaatttgggctcacagaatcaaagcctatgcttggtttaatgcttgcaatctgagctcttgaacaaataaaattaactattgtagtgtgaaaaaaaaaaaaaagg

SEQ ID NO: 74 - DNA, 1172 bp, Homo sapiens
  misc_feature: Incyte ID No: 3365683CB1
ccgcaccctcctcactccttgcagagccggcgccggaggagacgcacgcagctgactttgtcttctccgcacgactgttacagaggtctccagagccttctctctcctgtgcaaaatggcaactcttaaggaaaaactcattgcaccagttgcggaagaagaggcaacagttccaaacaataagatcactgtagtgggtgttggacaagttggtatggcgtgtgctatcagcattctgggaaagtctctggctgatgaacttgctcttgtggatgttttggaagataagcttaaaggagaaatgatggatctgcagcatgggagcttatttcttcagacacctaaaattgtggcagataaagattattctgtgaccgccaattctaagattgtagtggtaactgcaggagtccgtcagcaagaaggggagagtcggctcaatctggtgcagagaaatgttaatgtcttcaaattcattattcctcagatcgtcaagtacagtcctgattgcatcataattgtggtttccaacccagtggacattcttacgtatgttacctggaaactaagtggattacccaaacaccgcgtgattggaagtggatgtaatctggattctgctagatttcgctaccttatggctgaaaaacttggcattcatcccagcagctgccatggatggattttgggggaacatggcgactcaagtgtggctgtgtggagtggtgtgaatgtggcaggtgtttctctccaggaattgaatccagaaattggaactgacaatgatagtgaaaattggaaggaagtgcataagatggtggttgaaagtgcctatgaagtcatcaagctaaaaggatataccaactgggctattggattaagtgtggctgatcttattgaatccatgttgaaaaatctatccaggattcatcccgtgtcaacaatggtaaaggggatgtatggcattgagaatgaagtcttcctgagccttccatgtatcctcaatgcccggggattaaccagcgttatcaaccagaagctaaaggatgatgaggttgctcagctcaagaaaagtgcagataccctgtgggacatccagaaggacctaaaagacctgtgactagtgagctctaggctgtagaaatttaaaaactacaatgtgattaactcgg

SEQ ID NO: 75 - protein, 334 aa, Homo sapiens
  misc_feature: Incyte ID No: 3365683CD1
MATLKEKLIAPVAEEEATVPNNKITVVGVGQVGMACAISILGKSLADELALVDVLEDKLKGEMMDLQHGSLFLQTPKIVADKDYSVTANSKIVVVTAGVRQQEGESRLNLVQRNVNVFKFIIPQIVKYSPDCIIIVVSNPVDILTYVTWKLSGLPKHRVIGSGCNLDSARFRYLMAEKLGIHPSSCHGWILGEHGDSSVAVWSGVNVAGVSLQELNPEIGTDNDSENWKEVHKMVVESAYEVIKLKGYTNWAIGLSVADLIESMLKNLSRIHPVSTMVKGMYGIENEVFLSLPCILNARGLTSVINQKLKDDEVAQLKKSADTLWDIQKDLKDL

SEQ ID NO: 76 - DNA, 1833 bp, Homo sapiens
  misc_feature: Incyte ID No: 1309633.3
attttttatatgaataaatggatggagacaatcactatgaaatgcagtggtcaagagaagattggggcttgagccaaatcttggaggatgagtatggtttttatgggaccatagttgagaatgacttggaataatccaaagagtgtgactgatctggtttgagtggagagtctcaggataagtaaggtgaagtaggatagagagtgctttgaatgctagagaaaggttgacctgtagctaaactcagaagccctctgatttttattgactccagcaaagtttgagactacgtacttggggaaagcacagaaagagctatggtttgacaagagactaatatttttgtgccctgtgtcttattggtaagattcttgaagtggcaaataacaaagaggtctaatgactgcaaactcattgactatttattgacttttgtgttagataacttagaaattcagaattgctgtaaatgttaggttgtgacctagatgaaacaaatagggactttgaccttgccttcgcttgagtgcattctgccttagctctttaaaaagggacttttggtaacagagaagtactttgaaacatattgaataaattagctcagctaatctaggacatttgggttgtacagaaaaaacatgtactgggaaataatttaactgtctgatagaactttctgcagtgaaggaaatgttgcatatctttgttgtccagttttgtagtcattggccattcatggcttctgaacactcgaagtgtgattattatgactgagaaactgaattttaaattttaaattagttttaaaaattttaattaaatttaagtagccctgtgcagctattggcttctgtattggatagtacagctttagaatgtttgtcaacattaatagtaccaaggtagtggtgaagattaaaatgcaatatgaaggcttcagagcacctagcattgggcttggcatatagtatatacctagtaagtagtcacctttttatcaaattgaaacttggaaatggttaaaaatgagatgtatgtaaggggacagtgtgtaaaaactagtgaagtgctgtaaagagctaccagtaattattggcacttgccccaaatagtgtccttctgacctgagaatttcatattaacttaatcctcagggaatttagtgatcatcagggtagcatctattccatttgtttaactggaagaattatctgcaagcttctcagaggaaagttatggtttgtacttttgctctggcaagtaacatgggaagcaaagtctttaacacatacttgttttttttcttagcttgaaggatgccaatgatgtaccaatccaatgtgaaatctctcctcttatctcctatgctggagaaggattagaaagttatgtggcagataaagaattccatgcacctctaatcatcgatgagaatggagttcatgagctggtgaaaaatggtatttgaaccagataccaagttttgtttgccacgataggaatagcttttatttttgatagaccaactgtgaacctacaagacgtcttggacaactgaagtttaaatatccacagggttttattttgcttgttgaactcttagagctattgcaaacttcccaagatccagatgactgaatttcagatagcatttttatgattcccaactcattgaaggtcttatttatataattttttccaagccaaggagaccattggccatccaggaaatttcgtacagctgaaatataggcaggatgttcaacatcagtttacttgcagctggaagcatttgtttttgaagttgtacatagtaataatatgtcattg

SEQ ID NO: 77 - DNA, 2430 bp, Homo sapiens
  misc_feature: Incyte ID No: 1309633.1
  unsure 2338: a, t, c, g, or other
tctgggcggtcggcttccactccttcaggcgtcggcagccactagtcgtggcgagaggggcggggtggccggggctggcgctccacttggcccccgctcccggcccgccccgccgccgcggccccccggatgagggtatatattcggagcgagcgcgggacgccgatgagtggccgcgcggaaggagctggagacggtcgtagctgcggtcgcgccgagaaaggtttacaggtacatacattacacccctatttctacaaagcttggctattagagcattatgaacattaatgacctcaaactcacgttgtccaaagctgggcaagagcacctactacgtttctggaatgagcttgaagaagcccaacaggtagaactttatgcagagctccaggccatgaactttgaggagctgaacttctttttccaaaaggccattgaaggttttaaccagtcttctcaccaaaagaatgtggatgcacgaatggaacctgtgcctcgagaggtattaggcagtgctacaagggatcaagatcagctccaggcctgggaaagtgaaggacttttccagatttctcagaataaagtagcagttcttcttctagctggtgggcaggggacaagactcggcgttgcatatcctaaggggatgtatgatgttggtttgccatcccgtaagacactttttcagattcaagcagagcgtatcctgaagctacagcaggttgctgaaaaatattatggcaacaaatgcattattccatggtatataatgaccagtggcagaacaatggaatctacaaaggagttcttcaccaagcacaagtactttggtttaaaaaaagagaatgtaatcttttttcagcaaggaatgctccccgccatgagttttgatgggaaaattattttggaagagaagaacaaagtttctatggctccagatgggaatggtggtctttatcgggcacttgcagcccagaatattgtggaggatatggagcaaagaggcatttggagcattcatgtctattgtgttgacaacatattagtaaaagtggcagacccacggttcattggattttgcattcagaaaggagcagactgtggagcaaaggtggtagagaaaacgaaccctacagaaccagttggagtggtttgccgagtggatggagtttaccaggtggtagaatatagtgagatttccctggcaacagctcaaaaacgaagctcagacggacgactgctgttcaatgcggggaacattgccaaccatttcttcactgtaccatttctgagagatgttgtcaatgtttatgaacctcagttgcagcaccatgtggctcaaaagaagattccttatgtggatacccaaggacagttaattaagccagacaaacccaatggaataaagatggaaaaatttgtctttgacatcttccagtttgcaaagaagtttgtggtatatgaagtattgcgagaagatgagttttccccactaaagaatgctgatagtcagaatgggaaagacaaccctactactgcaaggcatgctttgatgtcccttcatcattgctgggtcctcaatgcagggggccatttcatagatgaaaatggctctcgccttccagcaattccccgcttgaaggatgccaatgatgtaccaatccaatgtgaaatctctcctcttatctcctatgctggagaaggattagaaagttatgtggcagataaagaattccatgcacctctaatcatcgatgagaatggagttcatgagctggtgaaaaatggtatttgaaccagataccaagttttgtttgccacgataggaatagcttttatttttgatagaccaactgtgaacctacaagacgtcttggacaactgaagtttaaatatccacagggttttattttgcttgttgaactcttagagctattgcaaacttcccaagatccagatgactgaatttcagatagcatttttatgattcccaactcattgaaggtcttatttatataattttttccaagccaaggagaccattggccatccaggaaatttcgtacagctgaaatataggcaggatgttcaacatcagtttacttgcagctggaagcatttgtttttgaagttgtacatagtaataatatgtcattgtacatgttgaaaggtttctatggtactaaaagtttgttttattttatcaaacattaagcttttttaagaaaataattgggcagtgaaataaatgtatcttcttgtctctggagtgtcatttgtacttgaagaaattatttcattgagaaaatatgaaacttgggagaaactttaaganaatgcataaaaacaaattgatgcttcagtgaggttgcagagtcatagaacttctttcagtgaatatctaactttgggctttatcttcttatc

SEQ ID NO: 78 - DNA, 1356 bp, Homo sapiens
  misc_feature: Incyte ID No: 008514.5
agaaaaacaaacgagatggaactgaagtcactgagagaattgtcactgaaacagtaaccacaagacttacatccttaccaccaaaaggcgggaccagcaatggctatgctaaaacagcctctcttggtggagggagccggctggagaaacaaagcctgactcatggcaactcttctccggagtaccctcggaaggaatttgcatcttcttcaaccagaggacggagtcaaacacgagagagtgaaattcgagttcgactgcagagtgcgtccccatccacccgatggacagaattggatgatgttaagcgtttgctcaaggggagtcgatcggcaagtgtgagccccacccggaattcctccaacacactccccatccccaagaaaggcactgtggagaccaaaattgtgacagcgagctcccagtcggtgtcaggcacctacgatgcaatgatcctggatgccaaccttccctcccatgtgtggtcctccaccctgcccgcggggtcctccatggggacctatcacaacaacatgacaacccagagctcatccctcctcaacaccaatgcctactctgcgggatcagtcttcggagttccaaacaacatggcgtcctgctcacccactttgcaccctggactcagcacatcctcctcagtgtttggcatgcagaacaatctggcccccagcttgaccaccctgtcccatggcaccaccaccacttccacagcatatggggtgaagaaaaacatgccccagagtcctgcggctgtgaacactggcgtttccacctccgccgcctgcaccacaagtgtgcagagcgatgaccttttgcacaaggactgcaagttcctgatcctagagaaagacaacacacctgctaagaaggagatggagctgctcatcatgaccaaggacagcgggaaggtctttacagcctcccctgccagcatcgctgcaacttctttttcagaagacaccctaaaaaaagaaaagcaagctgcctacaatgctgactcaggcctaaaagccgaagctaatggacgacctgaagactgtgtccacaagagggcaagaccaccactgcagatatccacagctacagcagcagtggtggtggtggcagtggaggaggtggcggtgttggtggcgctggcggcggcccttggggaccagcgccagcctgttgcccctgcggctcctgctgcagctggtggaagtggctgctgggcctgctgctcacctggctgctactcctggggctgctcttcggcctcattgctctggcggaggaggtgaggaagctgaaggcgcgtgtggatgagctggagaggatcaggaggagcatactgcc

SEQ ID NO: 79 - DNA, 148 bp, Homo sapiens
  misc_feature: Incyte ID No: 008514.3
  unsure 69: a, t, c, g, or other
gaccctgaagagctgtgtccacaaagggcaagaccactcactgcaggcacccctgaagagctgagtatnattctaggcactgtaaggattaaagaaagcactgtgtgaactgaggcatggagatgggaacgctcataggtttgggccc

SEQ ID NO: 80 - DNA, 3033 bp, Homo sapiens
  misc_feature: Incyte ID No: 1969731CB1
ctggctcccagctggtgctgaagctcgtcagttcaccatccgccctcggcttccgcggggcgctgggccgccagcctcggcaccgtcctttcctttctccctcgcgttaggcaggtgacagcagggacatgtctcgggagatgcaggatgtagacctcgctgaggtgaagcctttggtggagaaaggggagaccatcaccggcctcctgcaagagtttgatgtccaggagcaggacatcgagactttacatggctctgttcacgtcacgctgtgtgggactcccaagggaaaccggcctgtcatcctcacctaccatgacatcggcatgaaccacaaaacctgctacaaccccctcttcaactacgaggacatgcaggagatcacccagcactttgccgtctgccacgtggacgcccctggccagcaggacggcgcagcctccttccccgcagggtacatgtacccctccatggatcagctggctgaaatgcttcctggagtccttcaacagtttgggctgaaaagcattattggcatgggaacaggagcaggcgcctacatcctaactcgatttgctctaaacaaccctgagatggtggagggccttgtccttatcaacgtgaacccttgtgcggaaggctggatggactgggccgcctccaagatctcaggatggacccaagctctgccggacatggtggtgtcccacctttttgggaaggaagaaatgcagagtaacgtggaagtggtccacacctaccgccagcacattgtgaatgacatgaaccccggcaacctgcacctgttcatcaatgcctacaacagccggcgcgacctggagattgagcgaccaatgccgggaacccacacagtcaccctgcagtgccctgctctgttggtggttggggacagctcgcctgcagtggatgccgtggtggagtgcaactcaaaattggacccaacaaagaccactctcctcaagatggcggactgtggcggcctcccgcagatctcccagccggccaagctcgctgaggccttcaagtacttcgtgcagggcatgggatacatgccctcggctagcatgacccgcctgatgcggtcccgcacagcctctggttccagcgtcacttctctggatggcacccgcagccgctcccacaccagcgagggcacccgaagccgctcccacaccagcgagggcacccgcagccgctcgcacaccagcgagggggcccacctggacatcacccccaactcgggtgctgctgggaacagcgccgggcccaagtccatggaggtctcctgctaggcggcctgcccagctgccgcccccggactctgatctctgtagtggccccctcctccccggccccttttcgccccctgcctgccatactgcgcctaactcggtattaatccaaagcttattttgtaagagtgagctctggtggagacaaatgaggtctattacgtgggtgccctctccaaaggcggggtggcggtggaccaaaggaaggaagcaagcatctccgcatcgcatcctcttccattaaccagtggccggttgccactctcctcccctccctcagagacaccaaactgccaaaaacaagacgcgtagcagcacacacttcacaaagccaagcctaggccgccctgagcatcctggttcaaacgggtgcctggtcagaaggccagccgcccacttcccgtttcctctttaactgaggagaagctgatccagtttccggaaacaaaatccttttctcatttggggaggggggtaatagtgacatgcaggcacctcttttaaacaggcaaaacaggaagggggaaaaggtgggattcatgtcgaggctagaggcatttggaacaacaaatctacgtagttaacttgaagaaaccgatttttaaagttggtgcatctagaaagctttgaatgcagaagcaaacaagcttgatttttctagcatcctcttaatgtgcagcaaaagcaggcaacaaaatctcctggctttacagacaaaaatatttcagcaaacgttgggcatcatggtttttgaaggctttagttctgctttctgcctctcctccacagccccaacctcccacccctgatacatgagccagtgattattcttgttcagggagaagatcatttagatttgttttgcattccttagaatggagggcaacattccacagctgccctggctgtgatgagtgtccttgcaggggccggagtaggagcactggggtgggggcggaattggggttactcgatgtaagggattccttgttgttgtgttgagatccagtgcagttgtgatttctgtggatcccagcttggttccaggaattttgtgtgattggcttaaatccagttttcaatcttcgacagctgggctggaacgtgaactcagtagctgaacctgtctgacccggtcacgttcttggatcctcagaactctttgctcttgtcggggtgggggtgggaactcacgtggggagcggtggctgagaaaatgtaaggattctggaatacatattccatgggactttccttccctctcctgcttcctcttttcctgctccctaacctttcgccgaatggggcagcaccactgacgtttctgggcggccagtgcggctgccaggttcctgtactactgccttgtacttttcattttggctcaccgtggattttctcataggaagtttggtcagagtgaattgaatattgtaagtcagccactgggacccgaggatttctgggaccccgcagttgggaggaggaagtagtccagccttccaggtggcgtgagaggcaatgactcgttacctgccgcccatcaccttggaggccttccctggccttgagtagaaaagtcggggatcggggcaagagaggctgagtacggatgggaaactattgtgcacaagtctttccagaggagtttcttaatgagatatttgtatttatttccagaccaataaatttgtaactttgcaaaaacaaaaaaaaaaaa

SEQ ID NO: 81 - protein, 394 aa, Homo sapiens
  misc_feature: Incyte ID No: 1969731CD1
MSREMQDVDLAEVKPLVEKGETITGLLQEFDVQEQDIETLHGSVHVTLCGTPKGNRPVILTYHDIGMNHKTCYNPLFNYEDMQEITQHFAVCHVDAPGQQDGAASFPAGYMYPSMDQLAEMLPGVLQQFGLKSIIGMGTGAGAYILTRFALNNPEMVEGLVLINVNPCAEGWMDWAASKISGWTQALPDMVVSHLFGKEEMQSNVEVVHTYRQHIVNDMNPGNLHLFINAYNSRRDLEIERPMPGTHTVTLQCPALLVVGDSSPAVDAVVECNSKLDPTKTTLLKMADCGGLPQISQPAKLAEAFKYFVQGMGYMPSASMTRLMRSRTASGSSVTSLDGTRSRSHTSEGTRSRSHTSEGTRSRSHTSEGAHLDITPNSGAAGNSAGPKSMEVSC

SEQ ID NO: 82 - DNA, 1990 bp, Homo sapiens
  misc_feature: Incyte ID No: 403676.1
  unsure 1611, 1959: a, t, c, g, or other
gttaaggatgttttcatttatgtttattggtgacactggtgtatggcactcttttcctgtgagtcttgctgtgactttgatatgagggtaatgccagttctgtaaatgggctggaaagtcttccctcctctcttcttgtctgaaagagctttcaaaatatttgatagaattcaccagtgaagatatctgggctttggcatttctttttgagaaggtttttcaatttctgacttagttcacagttctcttcaggttttccagttaatttgggtcagttttggcaatttctatctctgcacgaattggtcctttttatccaagtggtctaacttattggcttcaggtttttcagagtattcacttataatgttttttaacttcctaagggtcattagtgataatctctcttttgttcacaattttggtaatttatcttatttctcataatctcttttttcactgttggtcaagaaaacagacagaggcagcagatggagatgtgacagattctctagtgggaaggctttgatcataatacctggcaagccagaatgatgccagcaaccccaaaggagctgccaatggatcttgacaggaaaatcactgactctggattgggctatgctcaaccaggggtagatgtcaatgcttcaagggctatacaagaaccagaaaagaagagattgcaccaatttggactgccgagtcacacttctttacacaagaaaacacactttacagcctcaaatggccaacaatgcagagggacatgtcctcctcaggggaaaatttgatagaaaattgaaatggtcaattgaaacattgtttgtctaaaaactgccaatctaattgttgggcaatataaacatgaaggactggcttttatatcttcatgaatgtgctcgctgtcaacatgagtggggctgcaagaataactccactaggtagcatcctctcttttacctgatggatcaggacgatgctgttatgacgatacatacaattcttctgaagaggagaggatgctggaataaagactacacttcacctcaaatttattttttcatatgttatgccatagtaccaggaatagggatgtaaataaaagtgccagaaacaggaattatccctaagcgaaaaaccataactatatttttatacctttatgtaagaattctcaagtattcatttcatctggaaaagttaggattaacagtaagtagagttatatagcctggtggtctgatagcccccactagttccttacctatataacctaccctctatgatcaagactagactgagggaagacatgctagaatactattgctgcctgcagtctaggccagcccagcagacaaacctaatgtcactcccaaacctggaaacaactgatataaagggacagagggaggaatagtggctgagggtaagtgataaatcaaagggttatataatgagaaaattcaatattagcttaactcctcaaaggtggtgtgagcaagagaagatattgtcacttaggtcaattatacgggatgcctaaaagagtgaagctgtatgtccctgagaccatccttgtttttggaacctggtaagattgagtgttgntcagcaaagctgagtgatttcattctgggagacatattcatacaagaggatgataaactggcctaattttgaatgaatggatgagactctgataatatgccaatacctctttactgttacaatcctttttcctgtaaaagatatgtggtcaaagaaaagtgggcaatctgagttatcacaaaaacatttagtctttgtccctggtttctcctaaaaaccttagactctcttgagtgataagagtgtctttagagtactgatgagaagactcttggctgagtggatcctggatatcttaagaacggtggctagctgccagagacacatacctgtgatgcgagggttatntttttccattttgtgttgctataaagaaatg

SEQ ID NO: 83 - DNA, 3634 bp, Homo sapiens
  misc_feature: Incyte ID No: 234864.2
  unsure 113: a, t, c, g, or other
gagaaagagtgcaagtgccccttgccaagcacccaactgccatccccaggcacctgtgtgtcccagggcccagaagagcttgtggcctccttgcagacatcagtagtggcccntggagaagccccttctgaagatgctgaccacgaagggaaagggagtcccttgaaaatgcctaagattaagcttccatcatttaggtggtccccgaagaaggaaacagggccaaaggtggacccagaatgcagcgtggaggactcaaaactcagcctggttttagacaaggatgaagtggccccgcagtctgccatccacatggatctgcctcctgagagggatggagagaaggggaggagcacaaagcctggctttgccatgccaaaacttgcacttcccaaaatgaaggcttctaagagtggggtcagcctgccacagagagacgtggatccttccctttctagtgccacagcagggggtagctttcaagacacagaaaaggccagcagtgacggtggtaggggaggacttggtgcaacagcaagtgccacaggaagtgagggtgtgaacctccaccggccacaggtccacattcccagtttgggctttgccaaacctgatctcagatcctccaaggccaaggtggaggtgagccagcctgaagctgacctgcctcttcccaaacatgatctgtctaccgaaggtgacagcagaggatgtgggctcggggatgtcccagtgagccagccttgtggggaggggatagcccccacacctgaagatcccctccagccatcctgtagaaaaccagatgctgaagtcctcacagtggaaagcccagaggaggaagccatgaccaagtactcgcaggaaagctggtttaaaatgcccaagttccgcatgcccagccttaggcgctctttcagggacagaggcggggctggaaagctggaagtggctcagacacaggcaccggcagcaacagggggtgaagcagcagctaaagtcaaagagttccttgtttctgggtcaaacgtggaggcagctatgtccctacagctcccagaggcagatgcagaagtgacagcttctgagagcaaatcatccacagatattctaaggtgtgatcttgacagcacaggcttgaagctgcacctctccactgctgggatgactggggatgagctttccacttctgaggtcaggatccatccatccaaaggacctctcccttttcagatgcctggcatgaggcttccagaaacccaggttcttccaggagaaatagatgagactcctctttccaagccaggacatgaccttgccagcatggaggataaaacagagaaatggtcttcccagcctgaaggtccacttaaattgaaagcttcaagtactgatatgccatcccagatttctgtggttaatgtggatcaactgtgggaagattctgtcctaactgtcaaattccccaaattaatggtaccaaggttctccttccctgcccccagctcagaggatgatgtgttcatccccactgtgagggaagtgcagtgtccagaggccaatattgatacagccctttgtaaggaaagtccggggctctggggagccagcatcctgaaggcaggtgctggggtccctggggagcagcctgtggaccttaacctgcctttggaagctcccccaatttcaaaggtcagagtgcatattcagggtgctcaggttgaaagtcaagaggtcactatacacagcatagtgacaccagagtttgtagatctctcagtacccaggactttttccactcagattgtgcgggaatcagagatccccacgtcagagattcaaacaccttcgtacggattttccttattaaaagtgaaaatcccagagccccacacgcaggctagagtgtacacaacaatgactcaacactctaggactcaggagggcacagaagaggctcccatacaagccaccccaggagtagactccatttctggagatctccagcctgacactggagaaccatttgagatgatctcttccagcgtcaatgtactgggacagcaaacactcacatttgaagttccttctggccaccagcttgcagacagctgttcagatgaggagccagcagaaattcttgagtttcccctgatgatagccaagaggcaaccacaccactggcagatgaaggcagggctccaaaagacaaaccagaaagtaaaaaatctggtctgctctggttttggcttccaaacattgggttttcctcttctgttgatgagacaggtgttgattccaaaaatgacgtccagagatctgctcccattcaaacacagcctgaggcacgaccagaggcagaactgcctaaaaaacaggagaaggcaggctggttccgatttcccaaattagggttctcctcatctcctaccaagaaaagcaaaagcaccgaagatggggcagagctggaagaacaaaaacttcaagaagaaacaatcacgttttttgatgcccgagaaagtttctcccctgaagagaaggaagagggtgaactgatcgggcctgtgggcactgggctggactccagagtgatggtgacatccgcggcaagaacagagttaatcctgcccgagcaggacagaaaagctgacgatgaaagcaaagggtcaggcctgggaccaaatgaaggctgagaggtatggctcatcagtacaagagagatgcaaaaaactaagttggaaagtaaaggctacacacacatatggagcaccccatcccacagcacattacatccacctcacttcacagaacggagaacagagcagaaatgaccagaacacctttgtcaccatcacacagccctcctaaaatggaaccaaagcttcccagctccctcaaagctttggatgcaaagaaggcaccctgacttccacaagacaccagaattcacacggtactcagaggcactgctggggaagtttgttggtctttattagataaatttccagagacctgtccataatacccaacagaacatgactgtttctttgaggaaagggttataatgtctgtggtgtacaagtcgtttttggtataacttctttcctgctgctgctgcttcccggcaaacatagttttcctatttcaggcagagtgcggtatattccaggaaacactgtttcctactcacttagcttacttctttgttgaatgcctcactaatggcaagtttcaagatgttttgggtgacaatgcacacatgctgggcaaaagggtgatggccagtggctggcagctgggccagcagaagctaggacatctgtgagttgtcattctcatctatccatgtccactggcctgccagcatccgccagtgccttgccagtgtgcacggtcccacactgtggcccctgagtcccctaatgtacacgctgcagccagaatgcagatggagctggcttggctgttccctggatgggcaataaagaaagtgctgcatcccatgctgaaggctgctgaggtcttctgtctcagggtcgaagtttaccagggctttcctcccacacactcctggtctctactaagcagctctagagaacagtcactgaggaacatttgggtggttgcctaccta

SEQ ID NO: 84 - DNA, 293 bp, Homo sapiens
  misc_feature: Incyte ID No: 072513.1
  unsure 101, 106, 108, 112, 114, 120, 122: a, t, c, g, or other
ttgtacaaaaagagcatttccaaactgctcaatgaaaagaaaggctcagctctgtgagatgaatgcacagatcacaaagaaatttgacagaatgcttctgnttagntnttangngaagangntttcttttccaccacaggcctcaaagcgctccaaatatccacatgcagattttatgaaagaagtgtttcaaagctactccaacaacagaaaggttcaactctatgggaagaatgcacacatcacaaagaagtttctcagaaggcatttgtgtagtttttatgtgaagatgt

SEQ ID NO: 85 - DNA, 1444 bp, Homo sapiens
  misc_feature: Incyte ID No: 1650519CB1
ggagaatttgaaagggtgccccaaaggacaatctctaaaggggtaagggggatacctaccttgtctggtaggggagatgtttcgttttcatgctttaccagaaaatccacttccctgccgaccttagtttcaaagcttattcttaattagagacaagaaacctgtttcaacttgaagacaccgtatgaggtgaatggacagccagccaccacaatgaaagaaatcaaaccaggaataacctatgctgaacccacgcctcaatcgtccccaagtgtttcctgacacgcatctttgcttacagtgcatcacaactgaagaatggggttcaacttgacgcttgcaaaattaccaaataacgagctgcacggccaagagagtcacaattcaggcaacaggagcgacgggccaggaaagaacaccacccttcacaatgaatttgacacaattgtcttgccggtgctttatctcattatatttgtggcaagcatcttgctgaatggtttagcagtgtggatcttcttccacattaggaataaaaccagcttcatattctatctcaaaaacatagtggttgcagacctcataatgacgctgacatttccatttcgaatagtccatgatgcaggatttggaccttggtacttcaagtttattctctgcagatacacttcagttttgttttatgcaaacatgtatacttccatcgtgttccttgggctgataagcattgatcgctatctgaaggtggtcaagccatttggggactctcggatgtacagcataaccttcacgaaggttttatctgtttgtgtttgggtgatcatggctgttttgtctttgccaaacatcatcctgacaaatggtcagccaacagaggacaatatccatgactgctcaaaacttaaaagtcctttgggggtcaaatggcatacggcagtcacctatgtgaacagctgcttgtttgtggccgtgctggtgattctgatcggatgttacatagccatatccaggtacatccacaaatccagcaggcaattcataagtcagtcaagccgaaagcgaaaacataaccagagcatcagggttgttgtggctgtgtattttacctgctttctaccatatcacttgtgcagaatgccttctacttttagtcacttagacaggcttttagatgaatctgcacaaaaaatcctatattactgcaaagaaattacacttttcttgtctgcgtgtaatgtttgcctggatccaataatttactttttcatgtgtaggtcattttcaagatggctgttcaaaaaatcaaatatcagacccaggagtgaaagcatcagatcactgcaaagtgtgagaagatcggaagttcgcatatattatgattacactgatgtgtaggccttttattgtttgttggaatcgatatgtacaaagtgtaatacatcag

SEQ ID NO: 86 - protein, 358 aa, Homo sapiens
  misc_feature: Incyte ID No: 1650519CD1
MGFNLTLAKLPNNELHGQESHNSGNRSDGPGKNTTLHNEFDTIVLPVLYLIIFVASILLNGLAVWIFFHIRNKTSFIFYLKNIVVADLIMTLTFPFRIVHDAGFGPWYFKFILCRYTSVLFYANMYTSIVFLGLISIDRYLKVVKPFGDSRMYSITFTKVLSVCVWVIMAVLSLPNIILTNGQPTEDNIHDCSKLKSPLGVKWHTAVTYVNSCLFVAVLVILIGCYIAISRYIHKSSRQFISQSSRKRKHNQSIRVVVAVYFTCFLPYHLCRMPSTFSHLDRLLDESAQKILYYCKEITLFLSACNVCLDPIIYFFMCRSFSRWLFKKSNIRPRSESIRSLQSVRRSEVRIYYDYTDV

SEQ ID NO: 87 - DNA, 3211 bp, Homo sapiens
  misc_feature: Incyte ID No: 1135936.1
  unsure 1650, 1661: a, t, c, g, or other
atgcaaaagtcaaagtaggtaacaggttggtaattaagtgtcaggaagactggaagaggcaaaaatcaagcagagttccaataagtgtatgaaaaaaaaatcataactgaaggtttaagaaagtccccaaggcagaatcacaatatgagcaggaggaataaaaagcttttggatataccaggcagctttctgtacgactcaggtttacaggtgaaattcctcagtttgagttcagaagaatttgaacttattccagctaaaatactgtcaatctttttattactgcctcctcccccatcttctgtctgggcaaagagatgcttggacttaggtccaaagctcctgccagggggagggaccatgtgtcacagcataacagacgcttgcaagtgctttactgagcagggctcaggtttgcagcaactctgataggctcacacaatggcctccattttacagcccctccttggaggcccactgatcagctgaaatgggaacacatgttgagccactaaccaccccggtgatggattagtttggattcaggaaagcgtgattattcttgaaataaacgaagctgaatagacatgctgacctcattcagttgatgagaggcagggaaagctggcttccaggactgccagcccacagagagctcagccctattggtccactttaattcatttcattgggctagtgtcaaccatacccactacggataaagatgttgccagatgaagcccagaagtgagcttcaccagactctgtagctcagagtcagaaacacgcatggaaaactaggtcatgggtattctaattttggtcttcagggaggctgctgacctaaagcgagttgctgagttagaccctatttgaaaaggaaaatgtgaaaaacaggaaggcactgaggtcttgttatctacataacaaatattcaggcacagaaaatatcataggttaaaatttcaagaagagtaaggcattagttggatcatgagaaggcagaagattatgttttctaacttgtaaggatcactggatcctactggattatgaagtgaatggcagtaatccactaactccttaaacagtgggaaaagagtgtgctgaaaatctgcccacatacttgtacactccatggccataccctggaattcttcccttaacataaaatgaccaacattttggagtaggcagttgaggttgttggttcttttcttttttttttttttcctcctcagttcttcatatttctctcaaattacctttcagcaatatgttcatatctcagccaataaagcgagtggttgatccacatgtgcaaataaaagggtaggaaagaaatataaatgggttttaaaaattcagactgccaaaaatagatgaaatagctcagaagagacataatatttatgaattgaattatcttggttgaaaataaaaagatcactttctcagttttcataagtattatgtctcttctgagctatttcatctatttttggcagtctgaatttttaaaacccatttaaatttttttccttacctttttatttgcatgtggatcaaccatcgctttattggctgagatatgaacatattgttgaaaggtaatttgagagaaatatgaagaactgaggagggaaaaanaaaaaaaaganaagaaccaacaacctcaactgcctactccaaaatgttggtcattttatgttaagggaagaattccagggtatggccatggagtgtacaagtatgtgggcagattttcagcaaactcttttcccactgtttaaggagttagtggattactgccattcacttcataatccagtaggatccagtgatccttacaagttagaaaacataatcttctgccttctcatgatccaactaatgccttactcttcttgaaattttaacctatgatattttctgtgcctgaatatttgttatgtagataacaagacctcagtgccttcctgtttttcacattttccttttcaaatagggtctaactcagcaactcgctttaggtcagcagcctccctgaagaccaaaattagaatatccatgacctagttttccatgcgtgtttctgactctgagctacagagtctggtgaagctcacttctgggcttcatctggcaacatctttatccgtagtgggtatggttgacactagcccaatgaaatgaattaaagtggaccaatagggctgagctctctgtgggctggcagtcctggaagccagctttccctgcctctcatcaactgaatgaggtcagcatgtctattcagcttcgtttattttcaagaataatcacgctttcctgaatccaaactaatccatcaccggggtggtttagtggctcaacattgtgttcccatttcagctgatcagtgggcctccaaggaggggctgtaaaatggaggccattgtgtgagcctatcagagttgctgcaaacctgacccctgctcagtaaagcacttgcaaccgtctgttatgctgtgacacatggcccctccccctgccaggagctttggacctaatccaagcatccctttgcccagaaagaagatgggggaggaggcagtaataaaaagattgaagtattttgctggaataagttcaaattcttctgaactcaaactgaggaatttcacctgtaaacctgagtcgtacagaaagctgcctggtatatccaaaagctttttattcctcctgctcatattgtgattctgcctttggggacttttcttaaaccttcagttatgatttttttttcatacacttattggaactctgcttgatttttgcctcttccagtcttcctgacactttaattaccaacctgttacctactttgactttttgcatttaaaacagacactggcatggatatagttttacttttaaactgtgtacataactgaaaatgtgctatactgcatactttttaaatgtaaagatatttttatctttatatgaagaaaatcacttaggaaatggctttgtgattcaatctgtaaactgtgtattccaagacatgtctgttctacatagatgcttagtccctcatgcaaatcaattactggtccaaaagattgctgaaattttatatgcttactgatatattttacaattttttatcatgcatgtcctgtaaaggttacaagcctgcacaataaaaatgtttaacggttaaaaa

SEQ ID NO: 88 - DNA, 1797 bp, Homo sapiens
  misc_feature: Incyte ID No: 2481150CB1
gaggcaagacttcggcacgaggcaggactctgggaccgcaggggctcccggaccctgactctgcagccgaaccggcacggtttcgtggggacccaggcttgcaaagtgacggtcattttctctttctttctccctcttgagtccttctgagatgatggctctgggcgcagcgggagctacccgggtctttgtcgcgatggtagcggcggctctcggcggccaccctctgctgggagtgagcgccaccttgaactcggttctcaattccaacgctatcaagaacctgcccccaccgctgggcggcgctgcggggcacccaggctctgcagtcagcgccgcgccgggaatcctgtacccgggcgggaataagtaccagaccattgacaactaccagccgtacccgtgcgcagaggacgaggagtgcggcactgatgagtactgcgctagtcccacccgcggaggggacgcgggcgtgcaaatctgtctcgcctgcaggaagcgccgaaaacgctgcatgcgtcacgctatgtgctgccccgggaattactgcaaaaatggaatatgtgtgtcttctgatcaaaatcatttccgaggagaaattgaggaaaccatcactgaaagctttggtaatgatcatagcaccttggatgggtattccagaagaaccaccttgtcttcaaaaatgtatcacaccaaaggacaagaaggttctgtttgtctccggtcatcagactgtgcctcaggattgtgttgtgctagacacttctggtccaagatctgtaaacctgtcctgaaagaaggtcaagtgtgtaccaagcataggagaaaaggctctcatggactagaaatattccagcgttgttactgtggagaaggtctgtcttgccggatacagaaagatcaccatcaagccagtaattcttctaggcttcacacttgtcagagacactaaaccagctatccaaatgcagtgaactccttttatataatagatgctatgaaaaccttttatgaccttcatcaactcaatcctaaggatatacaagttctgtggtttcagttaagcattccaataacaccttccaaaaacctggagtgtaagagctttgtttctttatggaactcccctgtgattgcagtaaattactgtattgtaaattctcagtgtggcacttacctgtaaatgcaatgaaacttttaattatttttctaaaggtgctgcactgcctatttttcctcttgttatgtaaatttttgtacacattgattgttatcttgactgacaaatattctatattgaactgaagtaaatcatttcagcttatagttcttaaaagcataaccctttaccccatttaattctagagtctagaacgcaaggatctcttggaatgacaaatgataggtacctaaaatgtaacatgaaaatactagcttattttctgaaatgtactatcttaatgcttaaattatatttccctttaggctgtgatagtttttgaaataaaatttaacatttaatatcatgaaatgttataagtagacatacattttgggattgtgatcttagaggtttgtgtgtgtgtacgtatgtgtgtgttctacaagaacggaagtgtgatatgtttaaagatgatcagagaaaagacagtgtctaaatataagacaatattgatcagctctagaataactttaaagaaagacgtgttctgcattgataaactcaaatgatcatggcagaatgagagtgaatcttacattactactttcaaaaatagtttccaataaattaatatc

SEQ ID NO: 89 - protein, 266 aa, Homo sapiens
  misc_feature: Incyte ID No: 2481150CD1
MMALGAAGATRVFVAMVAAALGGHPLLGVSATLNSVLNSNAIKNLPPPLGGAAGHPGSAVSAAPGILYPGGNKYQTIDNYQPYPCAEDEECGTDEYCASPTRGGDAGVQICLACRKRRKRCMRHAMCCPGNYCKNGICVSSDQNHFRGEIEETITESFGNDHSTLDGYSRRTTLSSKMYHTKGQEGSVCLRSSDCASGLCCARHFWSKICKPVLKEGQVCTKHRRKGSHGLEIFQRCYCGEGLSCRIQKDHHQASNSSRLHTCQRH

SEQ ID NO: 90 - DNA, 1523 bp, Homo sapiens
  misc_feature: Incyte ID No: 1378745CB1
tggggacgctctcagctctcggcgcacggcccaggtaagcggggcgcgccctgcccgcccgcgatgggccgccagctagcggggtgtggagacgctgggaagaagggttatcttgtagcatagcaacttcggatttcactctacccggagagtttcccgcttggttgaacacattggcctcaggaagcttccttcaaaatgtctactgttcacgaaatcctgtgcaagctcagcttggagggtgatcactctacacccccaagtgcatatgggtctgtcaaagcctatactaactttgatgctgagcgggatgctttgaacattgaaacagccatcaagaccaaaggtgtggatgaggtcaccattgtcaacattttgaccaaccgcagcaatgcacagagacaggatattgccttcgcctaccagagaaggaccaaaaaggaacttgcatcagcactgaagtcagccttatctggccacctggagacggtgattttgggcctattgaagacacctgctcagtatgacgcttctgagctaaaagcttccatgaaggggctgggaaccgacgaggactctctcattgagatcatctgctccagaaccaaccaggagctgcaggaaattaacagagtctacaaggaaatgtacaagactgatctggagaaggacattatttcggacacatctggtgacttccgcaagctgatggttgccctggcaaagggtagaagagcagaggatggctctgtcattgattatgaactgattgaccaagatgctcgggatctctatgacgctggagtgaagaggaaaggaactgatgttcccaagtggatcagcatcatgaccgagcggagcgtgccccacctccagaaagtatttgataggtacaagagttacagcccttatgacatgttggaaagcatcaggaaagaggttaaaggagacctggaaaatgctttcctgaacctggttcagtgcattcagaacaagcccctgtattttgctgatcggctgtatgactccatgaagggcaaggggacgcgagataaggtcctgatcagaatcatggtctcccgcagtgaagtggacatgttgaaaattaggtctgaattcaagagaaagtacggcaagtccctgtactattatatccagcaagacactaagggcgactaccagaaagcgctgctgtacctgtgtggtggagatgactgaagcccgacacggcctgagcgtccagaaatggtgctcaccatgcttccagctaacaggtctagaaaaccagcttgcgaataacagtccccgtggccatccctgtgagggtgacgttagcattacccccaacctcattttagttgcctaagcattgcctggccttcctgtctagtctctcctgtaagccaaagaaatgaacattccaaggagttggaagtgaagtctatgatgtgaaacactttgcctcctgtgtactgtgtcataaacagatgaataaactgaatttgtactttaaaaaaaaaaaa

SEQ ID NO: 91 - protein, 339 aa, Homo sapiens
  misc_feature: Incyte ID No: 1378745CD1
MSTVHEILCKLSLEGDHSTPPSAYGSVKAYTNFDAERDALNIETAIKTKGVDEVTIVNILTNRSNAQRQDIAFAYQRRTKKELASALKSALSGHLETVILGLLKTPAQYDASELKASMKGLGTDEDSLIEIICSRTNQELQEINRVYKEMYKTDLEKDIISDTSGDFRKLMVALAKGRRAEDGSVIDYELIDQDARDLYDAGVKRKGTDVPKWISIMTERSVPHLQKVFDRYKSYSPYDMLESIRKEVKGDLENAFLNLVQCIQNKPLYFADRLYDSMKGKGTRDKVLIRIMVSRSEVDMLKIRSEFKRKYGKSLYYYIQQDTKGDYQKALLYLCGGDD

SEQ ID NO: 92 - DNA, 1516 bp, Homo sapiens
  misc_feature: Incyte ID No: 1303785CB1
  unsure 1512: a, t, c, g, or other
ctttgtttttggacatagctgagccatgtacttcaaacagaaggcagccaattactaacttctggttgctaggtgtggcttcctttaaaatcctataaaatcagaagcccaagtctccactgccagtgtgaaatcttcagagaagaatttctctttagttctttgcaagaaggtagagataaagacactttttcaaaaatggcaatggtatcagaattcctcaagcaggcctggtttattgaaaatgaagagcaggaatatgttcaaactgtgaagtcatccaaaggtggtcccggatcagcggtgagcccctatcctaccttcaatccatcctcggatgtcgctgccttgcataaggccataatggttaaaggtgtggatgaagcaaccatcattgacattctaactaagcgaaacaatgcacagcgtcaacagatcaaagcagcatatctccaggaaacaggaaagcccctggatgaaacactgaagaaagcccttacaggtcaccttgaggaggttgttttagctctgctaaaaactccagcgcaatttgatgctgatgaacttcgtgctgccatgaagggccttggaactgatgaagatactctaattgagattttggcatcaagaactaacaaagaaatcagagacattaacagggtctacagagaggaactgaagagagatctggccaaagacataacctcagacacatctggagattttcggaacgctttgctttctcttgctaagggtgaccgatctgaggactttggtgtgaatgaagacttggctgattcagatgccagggccttgtatgaagcaggagaaaggagaaaggggacagacgtaaacgtgttcaataccatccttaccaccagaagctatccacaacttcgcagagtgtttcagaaatacaccaagtacagtaagcatgacatgaacaaagttctggacctggagttgaaaggtgacattgagaaatgcctcacagctatcgtgaagtgcgccacaagcaaaccagctttctttgcagagaagcttcatcaagccatgaaaggtgttggaactcgccataaggcattgatcaggattatggtttcccgttctgaaattgacatgaatgatatcaaagcattctatcagaagatgtatggtatctccctttgccaagccatcctggatgaaaccaaaggagagtatgagaaaatcctggtggctctttgtggaggaaactaaacattcccttgatggtctcaagctatgatcagaagactttaattatatattttcatcctataagcttaaataggaaagtttcttcaacaggattacagtgtagctacctacatgctgaaaaatatagcctttaaatcatttttatattataactctgtataatagagataagtccattttttaaaaatgttttccccaaaccataaaaccctatacaagttgttctagtaacaatacatgagaaagatgtctatgtagctgaaaataaaatgncgtc

SEQ ID NO: 93 - protein, 346 aa, Homo sapiens
  misc_feature: Incyte ID No: 1303785CD1
MAMVSEFLKQAWFIENEEQEYVQTVKSSKGGPGSAVSPYPTFNPSSDVAALHKAIMVKGVDEATIIDILTKRNNAQRQQIKAAYLQETGKPLDETLKKALTGHLEEVVLALLKTPAQFDADELRAAMKGLGTDEDTLIEILASRTNKEIRDINRVYREELKRDLAKDITSDTSGDFRNALLSLAKGDRSEDFGVNEDLADSDARALYEAGERRKGTDVNVFNTILTTRSYPQLRRVFQKYTKYSKHDMNKVLDLELKGDIEKCLTAIVKCATSKPAFFAEKLHQAMKGVGTRHKALIRIMVSRSEIDMNDIKAFYQKMYGISLCQAILDETKGEYEKILVALCGGN

SEQ ID NO: 94 - DNA, 1476 bp, Homo sapiens
  misc_feature: Incyte ID No: 589880CB1
ctcaatcaaggcggacgtgaagcatctacaaaggaggaatagtcaaagcagcagcggcggcggcggcggcggcggcggcagcagcagcagcagcaggagaccttctctgatggatgacctctgtgaagcaaatggcactttttccatcagcttatttaaaatattgggggaagaggacaactcaagaaacgtattcttctctcccatgagcatctcctctgccctggccatggtcttcatgggggcaaagggaagcactgcagcccagatgtcccaggcactttgtttatacaaagacggagatattcaccgaggtttccagtcacttctcagtgaagttaacagaactggcactcagtacttgcttagaactgccaacagactctttggagaaaagacgtgtgatttccttccagactttaaagaatactgtcagaagttctatcaggcagagctggaggagttgtcctttgctgaagacactgaagagtgcaggaagcatataaatgactgggtggcagagaagactgaaggtaagatttcagaggtactggatgctgggacagtcgatcccctgacaaagctggtccttgtgaatgccatttatttcaagggaaagtggaatgagcaatttgacagaaagtacacaaggggaatgctctttaaaaccaacgaggaaaaaaagacagtgcagatgatgtttaaggaagctaagtttaaaatggggtatgcggatgaggtacacacccaggtcctggagctgccctatgtggaagaggagctgagcatggtcattctgcttcccgatgacaacacggacctcgccgtggtggaaaaagcacttacatatgagaaattcaaagcctggacaaattcagaaaagttgacaaaaagtaaggttcaagttttccttcccagattaaagctggaggagagttatgacttggagcctttccttcgaagattaggaatgatcgatgcttttgacgaagccaaggcagacttttctggaatgtcaactgagaagaatgtgcctctgtccaaggttgcccacaagtgcttcgtggaggtcaatgaggaaggcacagaggctgccgcagccactgctgtggtcaggaattcccggtgcagcagaatggagccaagattctgtgcagaccacccttttcttttcttcatcaggcaccacaaaaccaactgcatcttgttctgtggcaggttctcttctccgtaaagaggagcaattgctgtacataccctcctttccttctacctatcttgccttaattaacattccctgtgacctagttggtgcagtggcttgaatgccaaaataaagcgtgtgcactggatagtgtgtgaaagtctttgctgaaagttccagagccattgagaataactgaggccgcagatgcatgaaatttgggcctggggaaggctatgctggttttggagtgtttggggtgcctgccattg

SEQ ID NO: 95 - protein, 374 aa, Homo sapiens
  misc_feature: Incyte ID No: 589880CD1
MDDLCEANGTFSISLFKILGEEDNSRNVFFSPMSISSALAMVFMGAKGSTAAQMSQALCLYKDGDIHRGFQSLLSEVNRTGTQYLLRTANRLFGEKTCDFLPDFKEYCQKFYQAELEELSFAEDTEECRKHINDWVAEKTEGKISEVLDAGTVDPLTKLVLVNAIYFKGKWNEQFDRKYTRGMLFKTNEEKKTVQMMFKEAKFKMGYADEVHTQVLELPYVEEELSMVILLPDDNTDLAVVEKALTYEKFKAWTNSEKLTKSKVQVFLPRLKLEESYDLEPFLRRLGMIDAFDEAKADFSGMSTEKNVPLSKVAHKCFVEVNEEGTEAAAATAVVRNSRCSRMEPRFCADHPFLFFIRHHKTNCILFCGRFSSP

SEQ ID NO: 96 - DNA, 5657 bp, Homo sapiens
  misc_feature: Incyte ID No: 241227.17
  unsure 4516: a, t, c, g, or other
atgcctctgttcctcctgctcttacttgtcctgctcctgctgctcgaggacgctggagcccagcaaggtgatggatgtggacacactgtactaggccctgagagtggaacccttacatccataaactacccacagacctatcccaacagcactgtttgtgaatgggagatccgtgtaaagatgggagagagagttcgcatcaaatttggtgactttgacattgaagattctgattcttgtcactttaattacttgagaatttataatggaattggagtcagcagaactgaaataggcaaatactgtggtctggggttgcaaatgaaccattcaattgaatcaaaaggcaatgaaatcacattgctgttcatgagtggaatccatgtttctggacgcggatttttggcctcatactctgttatagataaacaagatctaattacttgtttggacactgcatccaattttttggaacctgagttcagtaagtactgcccagctggttgtctgcttccttttgctgagatatctggaacaattcctcatggatatagagattcctcgccattgtgcatggctggtgtgcatgcaggagtagtgtcaaacacgttgggcggccaaatcagtgttgtaattagtaaaggtattccctattatgaaagttctttggctaacaacgtcacatctgtggtgggacacttatctacaagtctttttacatttaagacaagtggatgttatggaacactggggatggagtctggtgtgatcgcggatcctcaaataacagcatcatctgtgctggagtggactgaccacacagggcaagagaacagttggaaacccaaaaaagccaggctgaaaaaacctggaccgccttgggctgcttttgccactgatgaataccagtggttacaaatagatttgaataaggaaaagaaaataacaggcattataaccactggatccaccatggtggagcacaattactatgtgtctgcctacagaatcctgtacagtgatgatgggcagaaatggactgtgtacagagagcctggtgtggagcaagataagatatttcaaggaaacaaagattatcaccaggatgtgcgtaataactttttgccaccaattattgcacgttttattagagtgaatcctacccaatggcagcagaaaattgccatgaaaatggagctgctcggatgtcagtttattcctaaaggtcgtcctccaaaacttactcaacctccacctcctcggaacagcaatgacctcaaaaacactacagcccctccaaaaatagccaaaggtcgtgccccaaaatttacgcaaccactacaacctcgcagtagcaatgaatttcctgcacagacagaacaaacaactgccagtcctgatatcagaaatactaccgtaactccaaatgtaaccaaagatgtagcgctggctgcagttcttgtccctgtgctggtcatggtcctcactactctcattctcatattagtgtgtgcttggcactggagaaacagaaagaaaaaaactgaaggcacctatgacttaccttactgggaccgggcaggttggtggaaaggaatgaagcagtttcttcctgcaaaagcagtggaccatgaggaaaccccagttcgctatagcagcagcgaagttaatcacctgagtccaagagaagtcaccacagtgctgcaggctgactctgcagagtatgctcagccactggtaggaggaattgttggtacacttcatcaaagatctacctttaaaccagaagaaggaaaagaagcaggctatgcagacctagatccttacaactcaccagggcaggaagtttatcatgcctatgctgaaccactcccaattacggggcctgagtatgcaaccccaatcatcatggacatgtcagggcaccccacaacttcagttggtcagccctccacatccactttcaaggctacggggaaccaacctcccccactagtgggaacttacaatacacttctctccaggactgacagctgctcctcagcccaggcccagtatgataccccgaaagctgggaagccaggtctacctgccccagacgaattggtgtaccaggtgccacagagcacacaagaagtatcaggagcaggaagggatggggaatgtgatgtttttaaagaaatcctttgaagatgatgctgctttttacaaagcatcgttttaaagcacatggcctttttttttttaattattagtggtagtaatatatagaatgtattacataactgtcactgaagtggttggggaaaatgtggtgactgaggtacaggaaactactaatcttgccatcttgctttaaggtgttatggtggcacagttactgctcgcctgttaaatttcaaatgtcctgtttgatactactgtagaacactatttttaatacagaaaaagctccctataatgcacttcagagaaattaaaaatcacagagtatttattaccaatgctgcaggtacattaatgaactcgagatggctctgtaagcctgactggcaataacgcacggtactgttcttgaaatacctaatggcttgaaattctagtctgtttgtgaaagatgggtactatcatgatttcctcttctattcctatattcttttctggattttttttaataattagtgatataagcattgtttttattgcagccatatccacttatccatcttaagatctgtagctgggattttctgacttgtaatgagcagggggattgctttttcactttgtgacactctttagagctttaatgcttcacagtatatggcctggtctcatccttgcgtgttccacttgaggccctttggtgtcttgccccattcttgtgtttataaaatgtttgagtatttctgatgagtgatgcttgccttagtctcatgaattcagatcccttcatgtcctttaagtatgctcctcaatgtgtaaacaggaacaactttatgatttgaaagctttaaaggagattcttctcccacccccaactttatttgcaatgggatttttcctaggagagttatgaaaagttgaaggcttctaagggaatactgtaaacatgacccacttatatttatcacagtgaaaggcaaaattattcactcagaagtaatataaattacctctttaaaaagtaaccagaatttgtcctttttggttttatacattcacaaacatatacatttttcttgagtctcaaggtattttatatttttagtcagaaaaaataatttttcatttcagttttccataaactgttacacaaaatataaacctaacgtgtatttttcaggactgcgtgatcgtgcactttgtgtggtaagaggtttgagtagtcctatatgtcacctagggaacagacattatagcttcctagcaaatgaatattcatgccttgtttttgatacctcctggcagcttccatgtcaccacttgttcatacctgcccagagctagttttagacatggcaaaatagaaatcatctgtaatttattagctaacaatgtaaaaccatcttttaaagccttcagactgtcaagacgacatgagcagctcaccatatgataaaaatacataaatttgacattccctcttccataaacctttgtttgtagatttaatgttgaacagtacttttccataaagttctagtcacttctgttggcctgagccaccagattatgatgttgccagaattcactcaatttgaataaagatgaacagtatttgttttcttgtttccatgaattatatcagtattctaaaacatcgcttcagaaagagaactgtttatttctgcaggcttcctgtccttttgtggtatggttttttggccttattttcactggcttttccttctccaaactttgaggcgtgatttcattcattgaagaatcaatacatattttgtttcaaaatgtttgaaacaaaagacatagatggtagacttttattaaaacatatatcgatgtggaaagcacatatattaatgcagtcatcccttttcaggtgggaagagagcaaaccagttgattttttaattcatccttagtacacagagaatatacttttcctcaagtaatatacctgtttgaagctttaagagagatgtttttggtaactatttcattttcccaaagaagtttgctattcttgtgttaattgtgtatacctgattgttttttcctggaggtttttgttgttgttgtttagttttgggtttttttttttttaagaggggcaagtgttttctgaaatgatgcatattttaagactcgattcatattgccactgtgctatccttgaactaccaataatttttataaaatatctagtttttactacttttatataaactttactttccagatgaagagctgagcctgattcaaatggtttttctgctttatacttctttttagttcattggtttttatagtagaggttttctatttgtttttntttttttttactacatttatatgtctgatacatatacggctttggagacaatcaagtaacaactgaaaatgtgaaagtaaccatatctgacaaaattcccttgaatttttatcctttgcttgcaacatttaagactcaaagtcactggtatattggattaagttttttcctgttaatgcaattatagaaatacatcggagacacaacaaatgtggccattacaggtttcataaaattacactgacttggctgttacttgatcttaggaaacagcacagtttaagatattgtgaattctgacttatactttattaaatgctataaatctaaatagatcctgttggatgtgatgggtctagtccagtttatttaagttcatgtttcactgtttgcactttgcattgaacaatgggtttattcgctgatgtaaacggttcgagtgaagaattaatgcagtaagtatgacaacacatacacacttgcctctccccatctccagaagaggggagcagagtccgagcttatctaaatatgaatgtggccacaaagctgtggaaggtgacaaagcttaaacacctttgccctggctctgcattgtcacctagagagcaagaggtctatagaaacatcatgtcacatgaaacgattctctgctttttggttctgaacttgaagtccctaaactgcaaaatctaagagttgggtggttattaaaatgcttttaaaaagttaactgtggcaccaattctaatgtaatccaacttgtgactgtttttttttgttttgttttgtttttgtgtgtgtgtgtgtggcactgggaaaagtggaaacaaacatgtattgaaatacatattggaaataaaaatggtttgagcgtcagtgatattctcccagaatgtacttatcttacctcggcatgtactgtagtcactcagtatttgtatatgttgctagaatttagattgtaaaatagtgaaattttaatgtgttcatttgtttttaatgtatatatgtcttgctcagattatttggtttaaataaaacaaccttgaggtttgtagcttttccttatactataaaatgccagattcttctattttaacctcactaatttatggccaatattgtgcttccagcaaca

SEQ ID NO: 97 - DNA, 2841 bp, Homo sapiens
  misc_feature: Incyte ID No: 235095.7
ctgcacgcttggtgctacctctcgccgcctcatgcattcaggggacctgtgcctgtcattcaggcacaaggtgacggggctgcactctggcacactccaggtgtttgtgagaaaacacggtgcccacggagcagccctgtggggaagaaatggtggccatggctggaggcaaacacagatcaccttgcgaggggctgacatcaagagcgtcgtcttcaaaggtgaaaaaaggcgtggtcacactggggagattggattagatgatgtgagcttgaaaaaaggccactgctctgaagaacgctaacaactccagaactaacaatgaactcctatgttgctctatcctctttttccaattctcatcttctctcctcttctcccttttatcaggcctaggagaagagtgggtcagtgggtcagaaggaagtctatttggtgacccaggtttttctggcctgcttttgtgcaatcccaatgaacagtgataccctccttgaaatacaggggcatcgcagacacatcaaagccatctgtgggtgttgccttccatcctgtgtctctttcaggaaggcattcagcatgcgtgagccataccatcctccatcctgattacaaggtgctccttgtagcaaattatgagagtgagttacgggagcagtttttaaaagaaatctttgcagatggctatgatgttatgtgttcggtgttgtaccatgagtagtattgacttcccttgagatatgatgtacaatgtgcttgtgaaattgacttaccctcttcacttaagttagttctggcctgacctgaactctgacttttactgccattcactttataaaataagggtgtgtaacatatcaagatacatttatttttatctgttttttttttcctgttaaagacaattatgtagagtgggcacgtaatccctccttagtagtattgtgttttgtgtaaatgtgctattgatattaagtatttacatgttccaaatatttacagactctagttgcaaggtaaagggcagcttgtgatctcaaaaaaatacatggtgaaatgtcatccagttccatgaccttatattggcagcagtaggaaattggcagaagtgttgggttgtggtaacggagtgatgaatttttttttaatggccttgagtttgatctctgcaaaggataggaaacctttaggaagacaagaaactgcagttaatttagaactgtcactgtttcaagttacactttaaaaccacagcttttaccatcataacatggctctggtaatatgtaggaagctttataaaagttttggttgattcagaaaaaggatcctgttgcagagtgagaggaagcatagggggaaactccattggaacagattttcacacaacgttttaaattgatataagtttaggcagttgtagttcataacttatgttgctcatgttgtgctgtgtcaggatgggataggaagcaagtcccatgcttagaggcatgggatgtgttggaacgggatttacacacactggaggagcagggcaagttggaattctaagatccatgaacccccaactgtatttcctccctgcatattttaccaatatattaaaaaacaatgtaacttttaaaaggcatcattcctgaggtttgtcttaatttctgattaagtaatcagaatattttctgctgtttttgccaggaatcacaaagatgattaaagggttggaaaaaaagatctatgatggaaaattaaaggaactgggattattgagcctggagaagagaagactgaggggcaaaccattgatggttttcaagtatatgaagggttggcacagagagggtggcgaccagctgttctccatatgcactaagaatagaacaagaggaaactggcttagactagagtataagggagcatttcttggcaggggccattgttagaatacttcataaaaaaagaagtgtgaaaatctcagtatctctctctctttctaaaaaattagataaaaatttgtctatttaagatggttaaagatgttcttacccaaggaaaagtaacaaattatagaatttcccaaaagatgttttgatcctactagtagtatgcagtgaaaatctttagaactaaataatttggacaaggcttaatttaggcatttccctcttgacctcctaatggagagggattgaaaggggaagagcccaccaaatgctgagctcactgaaatatctctcccttatggcaatcctagcagtattaaagaaaaaaggaaactatttattccaaatgagagtatgatggacagatattttagtatctcagtaatgtcctagtgtggcggtggttttcaatgtttcttcatggtaaaggtataagcctttcatttgttcaatggatgatgtttcagatttttttttttttaagagatccttcaaggaacacagttcagagagattttcatcgggtgcattctctctgcttcgtgtgtgacaagttatcttggctgctgagaaagcagtgccctgccccacaccggcagacctttccttcacctcatcagtatgattcagtttctcttaatttctgattaagtaactcagaatatttcctgctattttggccaggaatcacaaagatgattaaagggttgaaaaaaaaaagatctatgagtggaaaattaaaggaactgggattattgagcctggagaagagaagactgaggggcaaaccattgactggtttccaagtattttgaagggttggcacagagagggtggcgaccagctgttctccatatgccctaagaatagaacaagaggaaactggcttagactagag

SEQ ID NO: 98 - DNA, 10058 bp, Homo sapiens
  misc_feature: Incyte ID No: 902506.10
ggttctcctccctcctcctcgcattctcctcctcctctgctcctcccgatccctcctccgccgcctggtccctcctcctcccgccctgcctccccgcgcctcggcccgcgcgagctataagtccgggcagcccccggcgcagcgcgggccgcagcagcctccgccccccgcacggtgtgagcgcccgccgcggccgaggcggccggagtcccgagctagccccggcggccgccgccgcccagaccggacgacaggccacctcgtcggcgtccgcccgagtccccgcctcgccgccaacgccacaaccaccgcgcacggccccctgactccgtccagtattgatcgggagagccggagcgagctcttcggggagcagcgatgcgaccctccgggacggccggggcagcgctcctggcgctgctggctgcgctctgcccggcgagtcgggctctggaggaaaagaaagtttgccaaggcacgagtaacaagctcacgcagttgggcacttttgaagatcattttctcagcctccagaggatgttcaataactgtgaggtggtccttgggaatttggaaattacctatgtgcagaggaattatgatctttccttcttaaagaccatccaggaggtggctggttatgtcctcattgccctcaacacagtggagcgaattcctttggaaaacctgcagatcatcagaggaaatatgtactacgaaaattcctatgccttagcagtcttatctaactatgatgcaaataaaaccggactgaaggagctgcccatgagaaatttacaggaaatcctgcatggcgccgtgcggttcagcaacaaccctgccctgtgcaatgtggagagcatccagtggcgggacatagtcagcagtgactttctcagcaacatgtcgatggacttccagaaccacctgggcagctgccaaaagtgtgatccaagctgtcccaatgggagctgctggggtgcaggagaggagaactgccagaaactgaccaaaatcatctgtgcccagcagtgctccgggcgctgccgtggcaagtcccccagtgactgctgccacaaccagtgtgctgcaggctgcacaggcccccgggagagcgactgcctggtctgccgcaaattccgagacgaagccacgtgcaaggacacctgccccccactcatgctctacaaccccaccacgtaccagatggatgtgaaccccgagggcaaatacagctttggtgccacctgcgtgaagaagtgtccccgtaattatgtggtgacagatcacggctcgtgcgtccgagcctgtggggccgacagctatgagatggaggaagacggcgtccgcaagtgtaagaagtgcgaagggccttgccgcaaagtgtgtaacggaataggtattggtgaatttaaagactcactctccataaatgctacgaatattaaacacttcaaaaactgcacctccatcagtggcgatctccacatcctgccggtggcatttaggggtgactccttcacacatactcctcctctggatccacaggaactggatattctgaaaaccgtaaaggaaatcacagggtttttgctgattcaggcttggcctgaaaacaggacggacctccatgcctttgagaacctagaaatcatacgcggcaggaccaagcaacatggtcagttttctcttgcagtcgtcagcctgaacataacatccttgggattacgctccctcaaggagataagtgatggagatgtgataatttcaggaaacaaaaatttgtgctatgcaaatacaataaactggaaaaaactgtttgggacctccggtcagaaaaccaaaattataagcaacagaggtgaaaacagctgcaaggccacaggccaggtctgccatgccttgtgctcccccgagggctgctggggcccggagcccaaggactgcgtctcttgccggaatgtcagccgaggcagggaatgcgtggacaagtgcaaccttctggagggtgagccaagggagtttgtggagaactctgagtgcatacagtgccacccagagtgcctgcctcaggccatgaacatcacctgcacaggacggggaccagacaactgtatccagtgtgcccactacattgacggcccccactgcgtcaagacctgcccggcaggagtcatgggagaaaacaacaccctggtctggaagtacgcagacgccggccatgtgtgccacctgtgccatccaaactgcacctacggatgcactgggccaggtcttgaaggctgtccaacgaatgggcctaagatcccgtccatcgccactgggatggtgggggccctcctcttgctgctggtggtggccctggggatcggcctcttcatgcgaaggcgccacatcgttcggaagcgcacgctgcggaggctgctgcaggagagggagcttgtggagcctcttacacccagtggagaagctcccaaccaagctctcttgaggatcttgaaggaaactgaattcaaaaagatcaaagtgctgggctccggtgcgttcggcacggtgtataagggactctggatcccagaaggtgagaaagttaaaattcccgtcgctatcaaggaattaagagaagcaacatctccgaaagccaacaaggaaatcctcgatgaagcctacgtgatggccagcgtggacaacccccacgtgtgccgcctgctgggcatctgcctcacctccaccgtgcaactcatcacgcagctcatgcccttcggctgcctcctggactatgtccgggaacacaaagacaatattggctcccagtacctgctcaactggtgtgtgcagatcgcaaagggcatgaactacttggaggaccgtcgcttggtgcaccgcgacctggcagccaggaacgtactggtgaaaacaccgcagcatgtcaagatcacagattttgggctggccaaactgctgggtgcggaagagaaagaataccatgcagaaggaggcaaagtgcctatcaagtggatggcattggaatcaattttacacagaatctatacccaccagagtgatgtctggagctacggggtgaccgtttgggagttgatgacctttggatccaagccatatgacggaatccctgccagcgagatctcctccatcctggagaaaggagaacgcctccctcagccacccatatgtaccatcgatgtctacatgatcatggtcaagtgctggatgatagacgcagatagtcgcccaaagttccgtgagttgatcatcgaattctccaaaatggcccgagacccccagcgctaccttgtcattcagggggatgaaagaatgcatttgccaagtcctacagactccaacttctaccgtgccctgatggatgaagaagacatggacgacgtggtggatgccgacgagtacctcatcccacagcagggcttcttcagcagcccctccacgtcacggactcccctcctgagctctctgagtgcaaccagcaacaattccaccgtggcttgcattgatagaaatgggctgcaaagctgtcccatcaaggaagacagcttcttgcagcgatacagctcagaccccacaggcgccttgactgaggacagcatagacgacaccttcctcccagtgcctgaatacataaaccagtccgttcccaaaaggcccgctggctctgtgcagaatcctgtctatcacaatcagcctctgaaccccgcgcccagcagagacccacactaccaggacccccacagcactgcagtgggcaaccccgagtatctcaacactgtccagcccacctgtgtcaacagcacattcgacagccctgcccactgggcccagaaaggcagccaccaaattagcctggacaaccctgactaccagcaggacttctttcccaaggaagccaagccaaatggcatctttaagggctccacagctgaaaatgcagaatacctaagggtcgcgccacaaagcagtgaatttattggagcatgaccacggaggatagtatgagccctaaaaatccagactctttcgatacccaggaccaagccacagcaggtcctccatcccaacagccatgcccgcattagctcttagacccacagactggttttgcaacgtttacaccgactagccaggaagtacttccacctcgggcacattttgggaagttgcattcctttgtcttcaaactgtgaagcatttacagaaacgcatccagcaagaatattgtccctttgagcagaaatttatctttcaaagaggtatatttgaaaaaaaaaaaaaaagtatatgtgaggatttttattgattggggatcttggagtttttcattgtcgctattgatttttacttcaatgggctcttccaacaaggaagaagcttgctggtagcacttgctaccctgagttcatccaggcccaactgtgagcaaggagcacaagccacaagtcttccagaggatgcttgattccagtggttctgcttcaaggcttccactgcaaaacactaaagatccaagaaggccttcatggccccagcaggccggatcggtactgtatcaagtcatggcaggtacagtaggataagccactctgtcccttcctgggcaaagaagaaacggaggggatggaattcttccttagacttacttttgtaaaaatgtccccacggtacttactccccactgatggaccagtggtttccagtcatgagcgttagactgacttgtttgtcttccattccattgttttgaaactcagtatgctgcccctgtcttgctgtcatgaaatcagcaagagaggatgacacatcaaataataactcggattccagcccacattggattcatcagcatttggaccaatagcccacagctgagaatgtggaatacctaaggatagcaccgcttttgttctcgcaaaaacgtatctcctaatttgaggctcagatgaaatgcatcaggtcctttggggcatagatcagaagactacaaaaatgaagctgctctgaaatctcctttagccatcaccccaaccccccaaaattagtttgtgttacttatggaagatagttttctccttttacttcacttcaaaagctttttactcaaagagtatatgttccctccaggtcagctgcccccaaaccccctccttacgctttgtcacacaaaaagtgtctctgccttgagtcatctattcaagcacttacagctctggccacaacagggcattttacaggtgcgaatgacagtagcattatgagtagtgtggaattcaggtagtaaatatgaaactagggtttgaaattgataatgctttcacaacatttgcagatgttttagaaggaaaaaagttccttcctaaaataatttctctacaattggaagattggaagattcagctagttaggagcccaccttttttcctaatctgtgtgtgccctgtaacctgactggttaacagcagtcctttgtaaacagtgttttaaactctcctagtcaatatccaccccatccaatttatcaaggaagaaatggttcagaaaatattttcagcctacagttatgttcagtcacacacacatacaaaatgttccttttgcttttaaagtaatttttgactcccagatcagtcagagcccctacagcattgttaagaaagtatttgatttttgtctcaatgaaaataaaactatattcatttccactctagtatgctctcaaatagccctaagacatctatactagcctggtatgggtatgaaagataccaagattaataaaacatagtccctgattctaagaaattcacaatttagcaaaggaaatggactcatagatgctaaccttaaaacaacgtgacaaatgccagacaggacccatcagcccaggcactgtgagagcacagagcagggaggttgggtcctgcctgaggagacctggaagggaggcctcacaggaggatgaccaggtctcagtcagcggggaggtggaaagtgcaggtgcatcaggggcaccctgaccgaggaaacagctgccagaggcctccactgctaaagtccacataaggctgaggtcagtcaccctaaacaacctgctccctctaagccaggggatgagcttggagcatcccacaagttccctaaaagttgcagcccccagggggattttgagctatcatctctgcacatgcttagtgagaagactacacaacatttctaagaatctgagattttatattgtcagttaaccactttcattattcattcacctcaggacatgcagaaatatttcagtcagaactgggaaacagaaggacctacattctgctgtcacttatgtgtcaagaagcagatgatcgatgaggcaggtcagttgtaagtgagtcacattgtagcattaaattctagtatttttgtagtttgaaacagtaacttaataaaagagcaaaagctattctagctttcttcttcatattttaattttccaccataaagtttagttgctaaattctattaattttaagattgtgcttcccaaaatagttctcacttcatctgtccagggaggcacagttctgtctggtagaagccgcaaagcccttagcctcttcacggatctggcgactgtgatgggcaggtcaggagaggagctgcccaaagtcccatgattttcacctaacagccctgatcggtcagtactcaaagcttggactccatccctgaaggtcttcctgattgatagcctggccttaataccctacagaaagcctgtccattggctgtttcttcctcagtcagttcctggaagaccttaccccatgaccccagcttcagatgtggtctttggaaacagaggtcgaaggaaagtaaggagctgagagctcacattcataggtgccgccagccttcgtgcatcttcttgcctcatctctaaggagctcctctaattacaccatgcccgtcaccccatgagggatcagagaagggatgagtcttctaaactctatattcgctgtgagtccaggttgtaagggggagcactgtggatgcatcctattgcactccagctgatgacaccaaagcttaggtgtttgctgaaagttcttgatgttgtgacttaccacccctgcctcacaactgcagacataaggggactatggattgcttagcaggaaaggcactggttctcaagggcggctgcccttgggaatcttctggtcccaaccagaaagactgtggcttgattttctcaggtgcagcccagccgtagggccttttcagagcaccccctggttattgcaacattcatcaaagtttctataacctctggcctaaaggaagggcctggtgggatctacttgggcactcgctgggggggccaccccccagtgccactctcactaggcctctgattgcacttgtgtaggatgaagctggtgggtgatgggaactcagcacctcccctcaggcagaaaagaatcatctgtggagcttcaaaagaaggggcctggagtctctgcagaccaattcaacccaaatctcgggggctctttcatgattctaatgggcaaccagggttgaaacccttatttctagggtcttcagttgtacaagactgtgggtctgtaccagagcccccgtcagagtagaataaaaggctgggtagggtagagattcccatgtgcagtggagagaacaatctgcagtcactgataagcctgagacttggctcatttcaaaagcgttcaattcatcctcaccagcagttcagctggaaagggggcaaatacccccacctgagctttgaaaacgccctgggaccctctgcattctctaagtaagttatagaaaccagtctcttccctcctttgtgagtgagctgctattccacgtaggcaacacctgttgaaattgccctcaatgtctactctgcatttctttcttgtgataagcacacacttttattgcaacataatgatctgctcacatttccttgcctgggggctgtaaaaccttacagaacagaaatccttgcctctttcaccagccacacctgccataccaggggtacagctttgtactattgaagacacagacaggatttttaaatgtaaatctatttttgtaactttgttgcgggatatagttctctttatgtagcactgaactttgtacaatatatttttagaaactcatttttctactaaaacaaacacagtttactttagagagactgcaatagaatcaaaatttgaaactgaaatctttgtttaaaagggttaagttgaggcaagaggaaagccctttctctctcttataaaaaggcacaacctcattggggagctaagctaggtcattgtcatggtgaagaagagaagcatcgtttttatatttaggaaattttaaaagatgatggaaagcacatttagcttggtctgaggcaggttctgttggggcagtgttaatggaaagggctcactgttgttactactagaaaaatccagttgcatgccatactctcatcatctgccagtgtaaccctgtacatgtaagaaaagcaataacatagcactttgttggtttatatatataatgtgacttcaatgcaaattttatttttatatttacaattgatatgcatttaccagtataaactagacatgtctggagagcctaataatgttcagcacactttggttagttcaccaacagtcttaccaagcctgggcccagccaccctagagaagttattcagccctggctgcagtgacatcacctgaggagcttttaaaagcttgaagcccagctacacctcagaccgattaaacgcaaatctctggggctgaaacccaagcattcgtagtttttaaagctcctgaggtcattccaatgtgcggccaaagttgagaactactggcctagggattagccacaaggacatggacttggaggcaaattctgcaggtgtatgtgattctcaggcctagagagctaagacacaaagacctccacatctgtcgctgagagtcaagaacctgaacagagtttccatgaaggttctccaagcactagaagggagagtgtctaaacaatggttgaaaagcaaaggaaatataaaacagacacctctttccatttcctaaggtttctctctttattaagggtggactagtaataaaatataatattcttgctgcttatgcagctgacattgttgccctccctaaagcaaccaagtagcctttatttcccacagtgaaagaaaacgctggcctatcagttacattacaaaaggcagatttcaagaggattgagtaagtagttggatggctttcataaaaacaagaattcaagaagaggattcatgctttaagaaacatttgttatacattcctcacaaattatacctgggataaaaactatgtagcaggcagtgtgttttccttccatgtctctctgcactacctgcagtgtgtcctctgaggctgcaagtctgtcctatctgaattcccagcagaagcactaagaagctccaccctatcacctagcagataaaactatggggaaaacttaaatctgtgcatacatttctggatgcatttacttatctttaaaaaaaaaggaatcctatgacctgatttggccacaaaaataatcttgctgtacaatacaatctcttggaaattaagagatcctatggatttgatgactggtattagaggtgacaatgtaaccgattaacaacagacagcaataacttcgttttagaaacattcaagcaatagctttatagcttcaacatatggtacgttttaaccttgaaagttttgcaatgatgaaagcagtatttgtacaaatgaaaagcagaattctcttttatatggtttatactgttgatcagaaatgttgattgtgcattgagtattaaaaaattagatgtatattattcattgttctttactcatgagtaccttataataataataatgtattctttgttagacaatgccatgttggtactagttattaatcaa

SEQ ID NO: 99 - DNA, 1066 bp, Homo sapiens
  misc_feature: Incyte ID No: 334103.1
  unsure 47: a, t, c, g, or other
ctcacggtggagcgccaagagcagaaggcagggccgggcagccagangaggcggaagttcctcaacctcagattcaggacaggctcgggacagggcccttcatcgacaggacagccaggcagggggttccagagtggggtgggccgtgcttggggtcctggaagagttggggccctggggtgatagcctcgaggagactggggctgccacaggcagcaggagagaggagagggcagaacaggatcgagaagtgatgcctgctcagagcatgccattgcccacagagctcggtgaccctagactttgcgagggaacccctcaggaagggggactcagggcagccaggctccatggaaagaccctggaggggcaggcacaggagacagcagtggcccagaggaagcccagggcccagccaactcctggaatgagccgggagggtgaaggcgagggactgcagagcctggaaatcgggatcgccagactgtccttgagagacacaaccgaaggaggcacacagattggcccaccagaaattagggtgcgagtacacgatttaaagacaccaaaatttgcattttccacagaaaaagagccagaaagagaaaggcgccttagtaccccacagcgagggaagagacaggatgcgtcctcaaaagcgggtactggcctgaagggtgaggaggtggaaggagccgggtggatgccgggcagggaaccaaccacacatgcagaagcacagggggatgaaggagatggagaggaaggactacagaggacaaggatcactgaggaacaggacaagggcagggaagacacagaaggacagataagaatgcccaagttcaagataccctccttaggatggtcgccaagcaagcacacaaagacaggcagagaaaaagccacagaagacacagagcagggaagggaaggagaggccacagcaacagctgatagaagagaacagagacgcacagaggaaggattaaaagacaaagaagacagtgactcaatgacaaacacaacaaaaatacaactaatacacgatgaaaaacgcttaaaa

SEQ ID NO: 100 - DNA, 1609 bp, Homo sapiens
  misc_feature: Incyte ID No: 238396.1
tgctttcccaagaggaaatgcatatgtaccttgatttaagcaaaactgataacagaaaattgaacttaatgaaagaaaaaagtctggatatggttactcactttacatagagtaagatttttaaaactaattttgcttagtagttaattttacaaaaatgaagagaaacaccctttaagtgtactcgtaatttaaaacacctttgaaatgtaattgtccaaatgtaatgctgctatgtatattatttgggttccagatttttccctttaaaattctcaaaacactcagtgtccttacaactgcagctaaaatggttaatcattctggcaagaaggtgacagtgtgtatattggaaaggcagacattcacatttgaaaatattttgcattattgttagctaaaatcaacctctccttgaatgtagatacaatatatggttttgcagtcaattctgaatggaaaaaaagaatcaagtctgaaatttatgtgtaatgtggcttcagatcatttgaacgatatgtagaaatctagatgaacatatcattagaggtgaaagcaaaatttgaaagcctaatgagatgaagcaacattatctctctctaatctgccaacaatattccctagattgtgttgccactgtattgattctgagtaatttggcttgtttatgcgtgatttaaatgcatgtggctgaatgcagtaatttttcaagttattgagtagtagagaattcaccactattcactgtctcccagagatgaacatataaaagaaaaaaaattctacttcatatatgtaagaataaagcaactaaatgatacaaaagtaaaaacttccaccagaatcagagatattccgacaagtgaattgtgagtctaacacgggaggacaaagctaggctcttgcaaggacagagcacacatggatcatgctgtatgagctcactttgtgtccctggaattagtgtttttttgtgtgtgatctaactggcaagtttaatgaatagccaaaatctatgttattcttgaggctcctaaaattatgtgtgaaccccaagttctgtctagtattatatccctaaaatgcttttaatagtggtatgttacaagtggcataagaagatcctgtttttaaatttgtcaggcattttattattcagtacataatatgtatagatctgagtgctgttttccttgcattgtctattatttttaccttgtctttcccctaagagaatttgaagaaaatcttcaccaatatttctagtgttgatggtaattaggaaaatagtagttgagagatgtaagaatagtttgagaagagtgagtaaaatgggtgaaatgacaagtgggaaccatgtagctgagatgtatttgtttagatgaaaagtctacactggttcttaatgtgaaaatcaaaccatgtatctaccttaagaacaatgttgttgtttttaatttattgtagcgatttagtttttttcacgtaatatttctattttctttgcagattgtttttaatttaaattgtggaatttttacttctcaaaatgtattaagtactgtattttttgaaatcttatttttaaataaatattttttaaaaacgt

SEQ ID NO: 101 - DNA, 3966 bp, Homo sapiens
  misc_feature: Incyte ID No: 252493.15
ggagaaactctacctgagagagctaaatgtcattactgaaactcagtgcactctaggcttaacagcattgcgcagtgatgaagtgattgatttaatgataaaagaatatccagccaaacatgctgagtattctgttattctacaagaaaaagaacgtcaacgaattacagaccattataaagagtattcccaaatgcaacaacagaatactcagaaagttgaagccagtaaagtgcctgagtatattaagaaagctgccaaaaaagcagcagaatttaatagcaacttaaaccgggaacgcatggaagaaagaagagcttattttgacttgcagacacatgttatccaggtacctcaagggaagtacaaagttttgccaacagagcgaacaaaggtcagttcttacccagtggctctcatccccggacagttccaggaatattataagaggtactcaccagatgagctgcggtatctgccattaaacacagccctgtatgagccccctctggatcctgagctccctgctctagacagtgatggtgattcagatgatggcgaagatggtcgaggtgatgagaaacggaaaaataaaggcacttcggacagctcctctggcaatgtatctgaaggggaaagccctcctgacagccaggaggactctttccagggaagacagaaatcaaaggacaaagctgccactccaagaaaagatggtcccaaacgttctgtactgtccaagtcagttcctgggtacaaggtagaagaaaaaagcccctgactcagcttctttactgaccagcctctccctgaaatattttaacttgactttcacgattgtggagcttctgcctgctgtacctcactagctgttcttctatggtgtgccctttgtccgctgctttcttttttgctttatttccttggtggcttttctgtcacttttggctatggtttaccttctgttttctgtatatgtacaatttataagtctttttttttctttgaaagaataaccaggcaagtatgggtttttaaaacattatttcataggcagaagtttatattttctttccttggagtaaagatcataattatttggcattttaaatgccccagcatttagtgtagctaaagctgctgagctataaagtatgagtggatatactgttagactaagttgcattttttttagtgcctttcattaagaaagatctgggtttaatctaaggattatttgatccatatgctaaatttagctaactctgggatagaaaataataaaacctgttacttacattgtagtgatttttagcataaccttggtaaagagcctatatgattctatggcaagaattaaaacatacttgttaacttgttgatctgattatcctcagagtaaaggagtaggttgtcagcaactattattatattttgaacttttcctccctctgtctgcccctcccttttcttctgaagaaaaggtgaggtgagagatgagtagccttatttgcatatagggatttaagaatatcataaaaggaagaattagctgtacagtttcatatttgggatggtggtagtaaaatagactaccttttgattcttttggtctgaaatgtattagaacatgcttttattgcacttatgaaggtgtattgaaggaaaattttagagtaagctgatgagaaagttttgccaagtgaaattgttaaacaccttgtatgtcagaactgtgattgtggtaaataattcacaagaacaggctgaagtaagtcacctttccctcaaactaactagaacacgttctaacatgttcatttacctttcttcaagtaaaaaaagcgacattaagttagtgtatttcatattttattaggaaatgcttttatgtaattaacttaaaaattcttttttttttttgtagcctatagcaagcaaattttaagcttaattcagcaagggttggcttccaagggtggctgcaataggctgcagctatgtgatttttgtacttgtttttacatatatagcttatgtaatttctttatataaattaatgcttaataactgaaagcaagtgagctccaaagatgaaatttcagaagcagtatacatgaatgagtgtgttctactggtctgctaagagctttaaatggaagtggccgctcaaagcacagtgtcctgttaactcttgagtgctaagtagatctttgaacagtaagcttgattgatcatgggttaaaaagagagaatattgaaatagatgttttaatacaggctggaaatcagctattcaacactatcattgatttagtatacaagaaatcatatggattaactgaacttaatagtactcaagtaggatatgcaaaatttatattttacataatctgtgaacatttttagtacctaaaaatgtttcaggtatttcaaagatgggaacaaccagtatctagtcatcatacattaatgtgaacatgcttattaaaagttaacctctttataaaaagtattaataaaccaagatgtgcctaaatattagggtacttcaagctaaaggtcatagtttatatataaaaagtacgagattcaaggaagtaatgtatctgatgctttgcttaataagattcactagtgcttgcccttaattcatagaacagtattgtttaggttacattaacctgaaatttaaagcataattattaggattccggcctataaatacaataattaaaatctatactatattattgctaccatgaaagtcttatctttggctgtttttcaagtagaaaagtaagtgtactgtgagccttttatttgagatgctgagagctattaggatgagtatttcagttttcttgtcaatagtgatactctgatgatgttgcagttatttgaagtagaactgattgtctaaaccagacacacataggagtgtgctccattggtcttgtggagagtgctgcacattaacccctccctgcaactgtgcaatccacttgagactggcttctctaagccacagttgttatctgctgtgtaaagtcctggatgccagcactgtggcttcttagagagggcagatgctttgtatatcgagctgcagcattcatcgtagaaaatgctacaaagctgtctctcttccccttctctcatgtttccctcttttcatcaagatgaaggctgttgggtaagaaaaactaagtgatttaacaaatcattatgatttaaacttagaaataaacctagaattttttggtgtcccttttatcataggtgtttaatgtatattttaatgattgtagaacttgaattgctctagaatgtgaatgactacccttgtgttttactccttttggcttttgttttgtaaagaatctcctgtgaggagttctgtttttagaatttaatattgtttggttacttccctgactttagtgaaagatattagagtatttactatgccagtatctaacttaaactattagtattaaataagtatatcttttacatttagtacaggtaccataaccaagagatttcttagttttgatggattaagagagagcattctgctgtatattatggcaggtacagatatgatcataactgaaccagaatttggattatagaagtgcacttcctagctgttttttatttaggtataggaacacacaatgagaaccttatgtttagaatgtagcagtaacaacagagggtaactacactgcaagacttaaatggtttgagcatgtgacactatccttttgttggggggagcagggtataaaaatatacatacaggagattagtttaatagtaaagttttatatgtatgtttaacttccatgatatttattattttgtagagacatttgtgattgtttagagttcttgtttttattctatttatgtataaggttgactttttttaaataaataagccaaaaattctttttg

SEQ ID NO: 102 - DNA, 3029 bp, Homo sapiens
  misc_feature: Incyte ID No: 481455.4
acatctaccagtctttaatgtctgtttggggtgagtggcgatcctctgttgtaggaatgtttttgaagatttctattttgttttccacttaggaaattcccctctctcatttggggtatatgcgttgagtataaggtaggctgtatttagacacactagaatcattaaatgtaggtgaagttgtagagaaaaatggcctgggtcaatgtaggatctagaaaattaggagtgtacatttgctggcttctttttgagttttgtactgtttattacaggaacatatttgtgtggctaatctctagggtgacagtgagtactaccctgctccttctgcattctagttatccaacacacccagcagattgtgttcagggacagaatgtgtttttagaaatcccttattattgaaatgaataataatatagctataaatatgaatgtctggaggtatccagatgtgccttaacaaatgtaaatggttttcattcagaagtttacatttttattacattataaaatctcatcattgggaactttctaaaccatgaatatcagttcttttaatgaaatttagttggtgctttatcattttggagaagttgctgtttgggacaatagcatcagtttatcaagaagtgtactcaccatgatattcaacaatgtgttacatttgacaaaacgtgtttagagtaagaaagactaactatactgtctgttatatttatttatgctttttgtagtttagctacatactataattttcattttaaacgttccttagttactacaaataatatttatgttttgcttcttcttagatgtaggcggatgcagaaatagaattatgttagagaaattattaaaagtttaattccagtaggcagttggagaaatctgaaactaatttgaaaaacttttatgctgtagtctcattagaatcattttaaaagcactgttgcttgcatttttcctagactacagagagtgttctttgtcattttttttcctattctgttgtgaagtttattgtttcagttatttgagggaaataacctcttaatatgtttattttcctgaactaaagttttcatgtagagaatacaattaaatgttttgtgttatgacccaaactggctggaagtagagttcagagagggagaagggacaagaatcagtgtgggcatctcaggaaagtggcgccagtgctgggctccagccttctccactggcatgatgggtcctcagattctcctctggataatgagggtgttgggcactgtgagctctgacttctggggaggataggccatcatggactccatacacaattttgatgggtatcagttctcataaaatacctgctacaatttatttattttgtagttgtttagaaaactgtgagcagttgggcattagtaaattgtagttatatcttaacgatcttgggaatcattgaaatatgagtttttttccctcactcctatttatttaattaaaaaattagggaagttgttcattcacagctgtatattaatataaaatctctttataaaatgattcagagaaaaggcagtagtggtcacttactgtgctaaaatacctttttctctaaaaatatttaagctttagggtttgtcatagttttactttttaaattatactttgtgtaacaatttacgttaactagaaaaattagatatataataagttttggtactaagaaacatttacattctacactcattagtcaaatgaacttttctttcccagtgctaacagattttgtttcatgtgaagaaaaataaaatacaaatgaaataaaagtctagaaacagcaacaggaaactcaccacagaaataaagacataacccttgataagtttgtgtaagtgccagaattattggaagcaggtgacgaatgattaagaaaagctttattgtggggacatgctttaagaatcagctctgtatttgtgccaaggagatcaggtattggtgtgcaaacagatcccattaatactctgatttgaaccatgaattccacctactctgcgttgaagccctccagtagactgatagatgtaatcaaatgatcagctaccaagtttaattcctttgcctgtgtgtagcaacagttggtagttttacaagttaagttgatggtctggctgcagataagagaaagactcagtgataggtggtttgtgagtgaagtaacttccacactgtcaagagttgacagcatattaattgtgtggcattataattgtgagaaacaaatgagagcaaaatgttaggtcctttgacaagcattttcctcctgtttttaaaaagggctttaagttgtttcctatgtaaggtaatctttcttttttagtattatctaagaaggatggtagattatgtcattttggaaactattgtgtcccttgtattttaaatatttcaggaaaatgcctacgattgttacaaagatgtgtgttttacttataacataagctctgattctccagtggccactgggccttctctgtgctctgtattcaactgcagtatgaattacagaatgctgtgcatgttcgttagtaccaataccatgtgtatgtggtagaagttgtaaccagtttctggatctgtatggtactataaaatacttattttataattctgtaaccgtatggcagtgttatgccaaaaatgtataaagagcaatagtttttgttgcttactgctgtattttaaaatattgtttctaaaataatagagttagagttccttttgagtaattatttttaagaactattgccaaatatacatcctgtaaaactaataaaagccactccatcttagataacattttagcattgtgctagagtacattatggtgattttgcacgattaaaatatttttaaagaactagaaaaaatgacttgctgttttcctgtcattaagcatgtattttttatgattaacacataagactaacattattttcttttatcctcaaaaataaatattgtgaagggtg

SEQ ID NO: 103 - DNA, 5636 bp, Homo sapiens
  misc_feature: Incyte ID No: 475076.2
gaagactcctgaagtctctgctgaggtctgccagctcttgggatctcagaggcggatctttagagcgggcagcttgtgcaagcggaagagtcccgaatgtgacaaagacacctccatctgcactgacctggacggcgttgccctgtgccagtgcaagtcgggatactttcagttcaacaagatggaccactcctgccgagcatgtgaagatggatataggcttgaaaatgaaacctgcatgagttgcccatttggccttggtggtctcaactgtggaaacccctatcagcttatcactgtggtgatcgcagccgcgggaggtgggctcctgctcatcctaggcatcgcactgattgttacctgttgcagaaagaataaaaatgacataagcaaactcatcttcaaaagtggagatttccaaatgtccccgtatgctgaataccccaaaaatcctcgctcacaagaatggggccgagaagctattgaaatgcatgagaatggaagtaccaaaaacctcctccagatgacggatgtgtactactcgcctacaagtgtaaggaatccagaacttgaacgaaaccgactctacccggcctacactggactgccaggatcacggcattcttgcattttccccggacagtataacccgtctttcatcagtgatgaaagcagaagaagagactacttttaagtccaggagagagagggactcattgctctgagccagtcacctgggacctctgctcagaggaccgcaccaggaggctgcgcccaggatttgtcgggagccacgctgagtggcaagcaggaagagggacaggcatgcggggcgtgaccacagtggaggagacaggtggatgtggaaccacaggctgctcattcagcacctttgttgttactgtgaacgtgaatgtgggccagtatcaagagagtctctctgagtgactgcaccatggcactggcaccagggcgacttattagccagggcagaccactagacttcagtgcagggacctggttttcccttcgtttgcactttagtaaattgggtgggaggtttccttttggatctgttttgagactgttccagaaagaaggcttcctttcccgagacacttccataggcagcaatttggtgattcatttgcagcaaaatactggcttgttaattattttcctgcccagcgcctgcgtgctaaacaacagatgaggatgagcgtaccactgaagtctgaagatgtcgccattgaacggacagtgttttcatatgtttctaggttgtcttatgctacagtttccaagccagcccccacagtgaggaaatgtgtgaggcaccgcacacaactgcaatgtgttttttaagtcaaggtgacacatgtatttaagatttttttttaaaatctctttgcagttaaatctcactttttcaaacaagcctggatcagggcaaaacaacttatatttggttttagctggaggctcagcaggcagattgcaggcaggggggcacttttcatccatgagggcccagcctggggcctgggactctgatcaccattgtggaggccagaggcagctgcgtatggaggagaaatgtcaaactgaacgcaggtttcaccactctaggaaagcagcttgttgagcccctgcagctggatgtggttagagggatgggctgaataggcaggttagatttcctgcatcaacagtgctttgggaagctgtgtggattcctgaggaagaacagggagccgagatggagccacacatgagtttgctcaccggctactgcagcactttgtacccagaatctcatgtccacaaaccccatgtaaactttcaaccactcaaagctgtttattcggctgaagaaataacttttttttctcacccagtcatttgtacctcttcatatggctgtgtcgcaccctccagaaacgtggttatacttccagtcagtgtgggagaactgaagacttccggttggtcgaggaactgagggttgaccttcgggaaggaagttccactcatcttatttattatgcctgtgatgtgggtcctgccagggagacatccagtactcggtgtctttaattgccacctggggaactgtgtttattggccttctttggggcatcctggttttggatgaagtgaggggaatacagaggtaaaagaattgtctccaccctgaagcggggagtcccgcttcacatttctggaaatggtgcagccactggggacagttctgccccgggcatggttgtttcttcaaggtcctctaaatataatccctattcttacataatccttggccctgatggttttaagcaagaactcctgtgtcccatggtctccaccactcaccatcaccctgctgtagcaagagtcctagtcaggggaggtgcattttagtagttaaattgcacttatccatgagataaataaaaggagaactgtttttatcagtggaggctaacctaaaatttcaaagtgtcgcctttttgaaatcttgggcctctctctctgtagaaccaatggccctttgtggctcacggcctcgcacctaactggagagttctgagctcctgcagctcacctgagcccacagactaggcttcttggctccttccgcagcatgcctgctcacccccagaacccgcagctgtgggaagagccatgtagggaggctattcccaggcatacacttccactgccttcagctgacgtcacagctgacaaatcatctcctctatcggagccagaagacttcagctccacaaaatgaagtgttctgtcctgaaaacattcttgggaagaatcccaacatcgagaaaacggtgtcctgtgagttccaacaatgcttcttgttcatgggtttcttccgtatggagtggattaagagtgttttattttgttgttctaactgagaaaaaaaggaggcacccacaaggttgaggtcacacagtctccacagtttccaggaggcgtttgggggtggggaaggcacctccagagcatgaggctctaaggggacatgagtaaagcatgtctgtgacccagtgaggaagggagaggccagctgcactcctgcacggggttcctagctgcagaagggtcccgcctaggccgaggggaaacacctgatagcagaagaggcctggatgcacacctggcacgccgaggctctccgcccagacacagtgctccatgtcagcccctgcacctggggtgtgtgattcacgtgcacagatgccacaatcctgcaccaatatcccacagatgggggaaggtgagaggaaggggcaagtgatgtgtaactgctcaagagatgcttaaacctccatagagaggagccgggcgcaggggcatctgtgtgtcccgtcacacactgcagcagggaagggtggctggctggctccctggcatcagtggtttggtttaagctccagaggttcttattgccattgtcttttcctctgccccttgagccagcctaaggccctggagtctgtttctttaggcggatgaactgacatgctcctaccatgaccaggctctgggcaaggctcctcacagtatccttgagaggtgggcatggaagtgcccatttctcaggtacagaaaccttcagagaggataaatagcttgccctgtagaagcaggactgaaacccttgtccgcctgactcccccagctactctgcccactgtagccccctgccttactgtcctggcacacccctcaccatcctgtataccttaaatatcaaagagggcaagagagaaagggctttaaagataagttatttttttaaggaaccttaatattatttttaagaagtaaccaaattagtgacgtgaaatgcaaaaaaaaaaaaaaaaaatgctgactacccttttgaaaatgtgctttcagattgttttttatatgtaattcttagacacttgtcattaagaaaatagtggctggcttgtgctcagcaagaagcacactggcacgtggctttggtataggaagtggaaggcaaggacctgggtttctgacaagtgcagtcagacatacacatccatctgagagctgcttgccttgttcccgtggtaaggccatggctcccacatactggaagcatatttttgtgaactgttttcagaattgggaacatattcagtggaatgtcttaaacgctgacacatcttcctcctttgaggggaagtatattttcagaagcagctaagacatttagagccaaaattgctgataggtggttcagtcaagttggctgatggcatctgaggtcaaaaactaagatgtgacgattgagttcttaaagaggtaactcttaaagtgggcccaagggagaaggcagcatctttggactcctaggctggatggctacccaagaatatgccattgaaggatgacacctattcagatgtgaaagttcccagagcaggcacctttgggtcacccaccacgtgtggctttttggtgcctgcatgaaactgtgttgccccctggtgagatgcccgggtgtcctgtaagccgatttaactctgcctgaggaagaggagctgtccactccagttgcccttggctaagtttagcctaacacacagggttttgacccatagttctaaaatacacaaattttgagactacagcacttctttggaaagaggaagaatgcaaagttcagtatttcaatactttgtattttacttgaaattacccttagtagcatcttttttttcctgtctgaaagcttttgtgtggatgagaagggacatttcatttcctcccttaacaaagtgtcattctgaggttctcatgtgtgtttttggaaatagagatactggttttgtagagtttgcctttgggtatgttttctttttttcttaaatctccaaggaagagaactgactaaaatagtaggaacatgaaagtattaaatgccaattaatttgttgtagtaaagtatcttcattagcgttatactccatcatatctggtgtaaactgctcacagaaaaccctatgaaaccaaagggggaccattcaggtctaaaaagcgacaggtccgagactgggtctgtcacctgggcattttcaaagaggacattttgaagaatttgcatattcagatttttaaaatgcacttaacatacttcattacagatttcttgggtagggaggatgggataggccagggatgggatggaatcagttctgcctgggaaactaatccgaatcatttacctttctgtattaaccttggcctgtcctaaaaagagaacgactgtttcatcatgagttgctctgagttttgttaatgtttgtgttggtggattgacggttaaatgaagcatttagctggaatatgaactttgggagttttcatgttgtcctggatttctctttgtaaacctttaaaccttagcccctggttgattgtgttaaacccattatgagaatgttatttaaagttgtattataattgcaacctccactaattattcagtactgtagcagcaaagtattatttgtaagaatttggttatttttatacttatatccactctaagtctggcgttctagtcagtaaaatgatgcaataaaattaatatcattttc

SEQ ID NO: 104 - DNA, 1299 bp, Homo sapiens
  misc_feature: Incyte ID No: 245722.8
agatggggcagctgctgggtgaccaggtcccgtagctcagaaggggtcagcgtctccttcccaccctccacggagtactggtgaaagttcttgatgagggtctcaatggccctctccacatcactgaattcctgagcatcctctgcgttggctgaccgacactgtcccatggtgcccactgtgtctggtcctttggtgagagttctgttgtcctatagctggccccagaggagctgatggctcctgtcttgtctcagcggctgccaacagcagatcatgagccatcagctcctctggggccagctataggacaacagaactttcaccaaaggaccagacacagtgagcaccatgggacagtgtcggtcagccaacgcagaggatgctcaggaattcagtgatgtggagagggccattgagaccctcatcaagaactttcaccagtactccgtggagggtgggaaggagacgctgaccccttctgagctacgggacctggtcacccagcagctgccccatctcatgccgagcaactgtggcctggaagagaaaattgccaacctgggcagctgcaatgactctaaactggagttcaggagtttctgggagctgattggagaagcggccaagagtgtgaagctggagaggcctgtccgggggcactgagaactccctctggaattcttggggggtgttggggagagactgtgggcctggagataaaacttgtctcctctaccaccaccctgtaccctagcctgcacctgtcctcatctctgcaaagttcagcttccttccccaggtctctgtgcactctgtcttggaggctcaggggagctcatgggtggaggagtctccaccagagggaggctcaggggactggttgggccagggatgaatatttgagggataaaaattgtgtaagagccaaagaattggtagtagggggagaacagagaggagctgggctatgggaaatgatttgaataatggagctgggaatatggctggatatctggtactaaaaaagggtctttaagaacctacttcctaatctcttccccaatccaaaccatagctgtctgtccagtgctctcttcctgcctccagctctgccccaggctcctcctagactctgtccctgggctagggcaggggaggagggagagcagggttgggggagaggctgaggagagtgtgacatgtggggagaggaccagctgggtgcttgggcattgacagaatgatggttgttttgtatcatttgattaataaaaaaaaatgaaaaaagtgaaaaaa

SEQ ID NO: 105 - DNA, 961 bp, Homo sapiens
  misc_feature: Incyte ID No: 227984.1
ccatttgtgatgtagataagcaagacaattttgatcatgagtggtgaaaagaggatcaaacttgactattcttgcaatggcagtccagcaacaagcctttcatttacattaaattataacttttcattcattcctaaaccaaacttaaaattctgctttcctttgagtagaaggtatttaacttgttttgtttttccttcagaaggaatttaatgcaaacggattgcagtcagcactttctgaatgttttcacacagtatgcaaagcttacatcataccaaggagtggagagttgaagtttcctcccagtgactccagtgacagaccacacctagaaagcgtttctcttcctgagtatttcaaaaagatgtaaaagagctggggagagtatgggaagaaacaatacaggattgcctttaattaattaagaattgcctcctgataaaaggaaaaagaaattaatgctggagtatggaggggtgataaccttaaagattataaatatttgttgtctataaatacttataaattataaacacaatataattaaaattagaacatcaggaaaagaattaaaatcctcaggttgcaaaaccaaaatgttaaccaaacaaatactcatgagattcaactttgttcacctatagaatagtacttattaacaacataaaatctaccctgtgagattgtatggaaactcagagtgtggcttatgataaccatctgtttatgatatttcatataaaacaatcttgtgatccttgtagttcctaccattaattttgtaggaaggaatctctgacattcctatggagctagaaccacatctgtcaatgtttaagtacctaagcagaacttaagaggaaaatgcataaatatatttggaaattgtttcatttttttctatatgtaagaagaccctaaaaagagcctttcagtaaagtttgtgcttcagaactac

SEQ ID NO: 106 - DNA, 2688 bp, Homo sapiens
  misc_feature: Incyte ID No: 245131.1
aaaactccttatcatccctgcatctatgaaaaaatgatgacatctcatggacacttagaagatctccaggacctttggaagaatgctacagatcctaaagtaaaaaccatttccaaaggttttttttggtcaaatatactgcagattaatgaagataattctcctttgtaaaattagctatgtggacacatacccttgtagggctgcgtttatctaatagtacttgaatgttgtatgttttcactgtcactgagtcaaacctggatgaaaaaaacctttaaatgttcgtctataccctaagtaaaatgaggacgaaagacaaatattttgaaagcctagtccatcagaatgtttctttgattctagaagctgtttaatatcacttatctacttcattgcctaagttcatttcaaagaatttgtatttagaaaaggtttatattattagtgaaaacaaaactaaagggaagttcaagttctcatgtaatgccacatatatacttgaggtgtagagatgttattaagaagttttgatgttagaataattgcttttggaaaataccaaatgaacgtacagtacaacatttcaaggaaatgaatatattgttagaccaggtaagcaagtttatttttgttaaagagcacttggtggaggtagtaggggcagggaaaggtcagcataggagagaaagttcatgaatctggtaaaacagtctcttgttcttaagaggagatgtagaaaaatgtgtacaatgttattataaacagacaaatcacgtcttaccacatccatgtagctactggtgttagagtcattaaaatacctttttttgcatcttttttcaaagtttaatgtgaacttttagaaaagtgattaatgttgccctaatactttatatgtttttaatggatttttttttaagtattagaaaatgacacataacacgggcagctggttgctcatagggtccttctctagggagaaaccattgttaattcaaataagctgattttaatgacgttttcaactggtttttaaatattcaatattggtctgtgtttaagtttgttatttgaatgtaatttacatagaggaatataataatggagagacttcaaatggaaagacagaacattacaagcctaatgtctccataattttataaaatgaaatcttagtgtctaaatccttgtactgattactaaaattaacccactcctccccaacaaggtcttataaaccacagcactttgttccaagttcagagttttaaattgagagcattaaacatcaaagttataatatctaaaacaatttatttttcatcaataactgtcagaggtgatctttattttctaaatatttcaaacttgaaaacagagtaaaaaagtgatagaaaagttgccagtttggggttaaagcatttttaaagctgcatgttccttgtaatcaaagagatgtgtctgagatctaatagagtaagttacatttattttacaaagcaggataaaaatgtggctataatacacactacctcccttcactacagaaagaactaggtggtgtctactgctagggagattatatgaaggccaaaataatgacttcagcaagagtgactgaactcactctaaggcctttgactgcagaggcacctgttagggaaaatcagatgtctcatataataaggtgatgtcggaaacacgcaaaacaaaacgaaaaaagatttctcagtatacacaactgaatgatgatacttacaatttttagcaggtagctttttaatgtttacagaaattttaatttttttctattttgaaatttgaggcttgtttacattgcttagataatttagaatttttaactaatgtcaaaactacagtgtcaaacattctaggttgtagttactttcagagtagatacagggttttagatcattacagtttaagttttctgaccaattaaaaaaacatagagaacaaaagcatatttgaccaagcaacaagcttataattaatttttattagttgattgattaatgatgtattgccttttgcccatatataccctgtgtatctatacttggaagtgtttaaggttgccattggttgaaaacataagtgtctctggccatcaaagtgatcttgtttacagcagtgcttttgtgaaacaattatttatttgctgaaagagctcttctgaactgtgtccttttaatttttgcttagaatagaatggaacaagtttaaatttcaaggaaatatgaaggcacttcctttttttctaagaaggaagttgctagatgattccttcatcacacttacttaaagtactgagaagagtatctgtaaataaaagggttccaaccttttaaaaaagaaggaaaaaactttttggtgctccagtgtagggctatctttttaaaaaatgtcaacaaagggaaaataaactatcagcttggatggtcacttgaatagaagatggttatacacagtgttattgttaaaatttttttaccttttggttggtttgcatcttttttccatattgttaattttataccaaaatgttaaatatttgtattacttgaattttgctcttgtatggcaaaataattagtgagtttaaaaaaaatctatagtttccaataaacaactgaaaaattaaaaaaacaaacaaaacaaaag

SEQ ID NO: 107 - DNA, 2021 bp, Homo sapiens
  misc_feature: Incyte ID No: 010205.4
tttatgtccagattcccatttctgaaatccagatccaacacaagcagtcttgccgttagggcattttgaagcagatagtagagtaagaacttagtgactacagcttattcttctgtaacatatggtttcaaacatctttgccaaaagctaagcagtggtgaagtgaaaagggcatattgccccaaggttacactgaagcagctcatagcaagttaaaatattgtgacagatttgaaatcatgtttgaatttcatagtaggaccagtacaagaatgtccctgctagtttctgtttgatgtttggttctggcggctcaggcattttgggaactgttgcacagggtggagtcaaaacaacctacatataaaaagagaaaaagagaaacttgtccatttagctttcataagaaatcccatggcaaagggtaataaaaaggacctaatcttaaaaatacaatttctaagcacttgtaagaacccagtgggttggagcctcccactttgtccctcctttgaagtggatgggaactcaaggtgcaaagaacctgttttggaagaaagcttggggccatttcagccccctgtattctcatgattttctctcaggaagcacacactgtgaatggcagacttttcatttagccccaggtgacttactaaaaatagttgaaaattattcacctaagaatagaatctcagcattgtgttaaataaaaatgaaagctttagaaggcatgagatgttcctatcttaaataaagcatgtttcttttctatagagaaatgtatagtttgactctccagaatgtactatccatcttgatgagaaaactcttaaatagtaccaaacattttgaactttaaattatgtatttaaagtgagtgtttaagaaactgtagctgcttcttttacaagtggtgcctattaaagtcagtaatggccattattgttccattgtggaaattaaattatgtaagcttcctaatatcataaacatattaaaattcttctaaaatattggttttcttttaagtgacaatttgactattcttatgataagcacatgagagtgtcttacattttccaaaagcaggctttaattgcatagttgagtctaggaaaaaataatgttaaaagtgaatatgccaccataattacttaattatgttagtatagaaactacagaatatttaccctggaaagaaaatattggaatgttattataaactcttagatatttatataattcaaaagaatgcatgtttcacattgtgacagataaagatgtatgatttctaaggctttaaaaattattcataaaacagtgggcaatagataaaggaaattctggagaaaatgaaggtatttaaagggtagtttcaaagctatatatattttgaaggatatattctttatgaacaaatatattgtaaaaatttatactaaggtcatctggtaactgtgggattaatatggtcgaaaacaaatgttatggagaagctgtcccaagcaaactaaattacctgtacttttttcccatttcaagggaagaggcaaccacatgaagcaatacttcttacacatgcctaagaacgttcattgaaaaaataaatttttaaaaggcatgtgtttcctatgccaccaatacttttgaaaaattgtgaaccttacccaaaaccatttatcatgtccattaagtatatttgggtatataattaggaagatatttacatgttccatctccacagtggaaaaacttattgaggctaccaaagtgtgccaagaaatgtaagtccttagagtaattagaaatgctgttttcctcaaaagcatgagaaactagcattttcatttcttatttactccctttctatatcaatgcaattcacaacccaattttaatacatccctatatctcaagcatttctatcttgtactttttcagaaaataaaccaaaaataatcctttggtctctctatcttctgacctttgtaagcaacagaaatgtaaaaacagaaggg

SEQ ID NO: 108 - DNA, 2540 bp, Homo sapiens
  misc_feature: Incyte ID No: 979243.1
  unsure 2001-2002, 2004: a, t, c, g, or other
cgccaggacatgcagcccaccatgaagttcgtgatggacacatctaaatactggtttaagccaaacatcacccgagagcaagcaatcgagctgctgaggaaggaggagccaggggctttgtcataagggacagctcttcataccgaggctccttcggcctggccctgaaggtgcaggaggttcccgcgtctgctcagaatcgaccaggtgaggacagcaatgacctcatccgacacttcctcatcgagtcgtctgccaaaggagtgcatctcaaaggagcagatgaggagccctactttgaactgggaggtgcagatggggcctcggactctacagacagcccagcctcctgccagaagaaatctgcgggctgccacaccctgtacctgagctcagtgagcgtggagaccctgactggagccctggccgtgcagaaagccatctccaccacctttgagagggacatcctccccacgcccaccgtggtccacttcaaagtcacagagcagggcatcactctgactgatgtccagaggaaggtgtttttccggcgccattacccactcaccaccctccgcttctgtggtatggaccctgagcaacggaagtggcagaagtactgcaaaccctcctggatctttgggtttgtggccaagagccagacagagcctcaggagaacgtatgccacctctttgcggagtatgacatggtccagccagcctcgcaggtcatcggcctggtgactgctctgctgcaggacgcagaaaggatgtaggggagagactgcctgtgcacctaaccaacacctccaggggctcgctaaggagcccccctccaccccctgaatgggtgtggcttgtggccatattgacagaccaatctatgggactagggggattggcatcaagttgacacccttgaacctgctatggccttcagcagtcaccatcatccagaccccccgggcctcagtttcctcaatcatagaagaagaccaatagacaagatcagctgttcttagatgctggtgggcatttgaacatgctcctccatgattctgaagcatgcacacctctgaagacccctgcatgaaaataacctccaaggaccctctgaccccatcgacctgggccctgcccacacaacagtctgagcaagagacctgcagcccctgtttcgtggcagacagcaggtgcctggcggtgacccacggggctcctggcttgcagctggtgatggtcaagaactgactacaaaacaggaatggatagactctatttccttccatatctgttcctctgttccttttcccactttctgggtggctttttgggtccacccagccaggatgctgcaggccaagctgggtgtggtatttagggcagctcagcagggggaacttgtccccatggtcagaggagacccagctgtcctgcacccccttgcagatgagtatcaccccatcttttctttccacttgttttttatttttatttttttttgagacagagtctcactgtcacccaggctgaactgcagtggtgtgatctaggctcactgcaacctccacctcccaggttcaagcaattatcctgcctcaggctcccaagtagctgggattacaggcatgtgcaactcacccagctaattttgtatttttagtagagacagggtttcaccatgttggccaggctggtcttgaactcctgaccgcaggtaatccacctgcttcggcctcccaaagtgctgggattacaggcgcaagccacccagcccagcttctttccattccttgataggcgagtattccaaagctggtatcgtagctgccctaatgttgcatattaggcggcgggggcagagataagggccatctctctgtgattctgcctcagctcctgtcttgctgagccctcccccaacccacgctcacacacacacacacacacacacacacacacacacacacacacacacacacacacacacacacacacacnngnccctctactgctatgtggcttcaaccagcctcacagccacacgggggaagcagagagtcaagaatgcaaagaggccgcttccctaagaggcttggaggagctgggctctatcccacacccacccccaccccacccccacccagcctccagaagctggaaccatttctcccgcaggcctgagttcctaaggaaaccaccctaccggggtggaagggagggtcagggaagaaacccactcttgctctacgaggagcaagtgcctgccccctcccagcagccagccctgccaaagttgcattatctttggccaaggctgggcctgacggttatgatttcagccctgggcctgcaggagaggctgagaccagcccacccagccagtggtcgagcactgccccgccgccaaagtctgcagaatgtgagatgaggttctcaaggtcacaggccccagtcccagcctgggggctggcagaggcccccatatactctgctacagctcctatcatgaaaaataaaatgtttgtctttgcaaaaca

SEQ ID NO: 109 - DNA, 1201 bp, Homo sapiens
  misc_feature: Incyte ID No: 4322678CB1
ctgttgtgcatccagaggtggaattggggcccggtaagtgatttgaataatttaataaataagttagagggctcagcaggcccagaacgagccattttgtcagctgcagcagtcattaactccgcagaggcctctggtccctcgccaggaagtttcttcactggaaactgggaagacagggtggtttgtaacttcgggagttgagccacgagctgttgtgcatccagaggtggaattggggcccggcattccctcctcgtcccgggctggcccttgcccccaccctgcaactcctggttgagatgggctcagccaagagcgtcccagtcacaccagcgcggcctccgccgcacaacaagcatctggctcgagtggcggacccccgttcacctagtgctggcatcctgcgcactcccatccaggtggagagctctccacagccaggcctaccagcaggggagcaactggagggtcttaaacatgcccaggactcagatccccgctctcctactcttggtattgcacggacacctatgaagaccagcagtggagaccccccaagcccactggtgaaacagctgagtgaagtatttgaaactgaagactctaaatcaaatcttcccccagagcctgttctgcccccagaggcacctttatcttctgaattggacttgcctctgggtacccagttatctgttgaggaacagatgccaccttggaaccagactgagttcccctccaaacaggtgttttccaaggaggaagcaagacagcccacagaaacccctgtggccagccagagctccgacaagccctcaagggaccctgagactcccagatcttcaggatggaaaccaaacagcagcaaggtactagggagatcccccctcaccatcctgcaggatgacaactcccctggcaccctgacactacgacagggtaagcggccttcacccctaagtgaaaatgttagtgaactaaaggaaggagccattcatggaactggacgacttctgaaaactggaggacgagcatgggagcaaggccaggaccatgacaaggaaaatcagcactttcccttggtggagagttaagccctgcatggccccagcaatgcagtcacccagggcctggtgatatctgtgtcctctcaccccatctttcccagggatactgaggaatgggggagcttgcatagccg

SEQ ID NO: 110 - protein, 263 aa, Homo sapiens
  misc_feature: Incyte ID No: 4322678CD1
MGSAKSVPVTPARPPPHNKHLARVADPRSPSAGILRTPIQVESSPQPGLPAGEQLEGLKHAQDSDPRSPTLGIARTPMKTSSGDPPSPLVKQLSEVFETEDSKSNLPPEPVLPPEAPLSSELDLPLGTQLSVEEQMPPWNQTEFPSKQVFSKEEARQPTETPVASQSSDKPSRDPETPRSSGWKPNSSKVLGRSPLTILQDDNSPGTLTLRQGKRPSPLSENVSELKEGAIHGTGRLLKTGGRAWEQGQDHDKENQHFPLVES

SEQ ID NO: 111 - DNA, 2453 bp, Homo sapiens
  misc_feature: Incyte ID No: 256716CB1
cgaaaagattcttaggaacgccgtaccagccgcgtctctcaggacagcaggcccctgtccttctgtcgggcgccgctcagccgtgccctccgcccctcaggttctttttctaattccaaataaacttgcaagaggactatgaaagattatgatgaacttctcaaatattatgaattacatgaaactattgggacaggtggctttgcaaaggtcaaacttgcctgccatatccttactggagagatggtagctataaaaatcatggataaaaacacactagggagtgatttgccccggatcaaaacggagattgaggccttgaagaacctgagacatcagcatatatgtcaactctaccatgtgctagagacagccaacaaaatattcatggttcttgagtactgccctggaggagagctgtttgactatataatttcccaggatcgcctgtcagaagaggagacccgggttgtcttccgtcagatagtatctgctgttgcttatgtgcacagccagggctatgctcacagggacctcaagccagaaaatttgctgtttgatgaatatcataaattaaagctgattgactttggtctctgtgcaaaacccaagggtaacaaggattaccatctacagacatgctgtgggagtctggcttatgcagcacctgagttaatacaaggcaaatcatatcttggatcagaggcagatgtttggagcatgggcatactgttatatgttcttatgtgtggatttctaccatttgatgatgataatgtaatggctttatacaagaagattatgagaggaaaatatgatgttcccaagtggctctctcccagtagcattctgcttcttcaacaaatgctgcaggtggacccaaagaaacggatttctatgaaaaatctattgaaccatccctggatcatgcaagattacaactatcctgttgagtggcaaagcaagaatccttttattcacctcgatgatgattgcgtaacagaactttctgtacatcacagaaacaacaggcaaacaatggaggatttaatttcactgtggcagtatgatcacctcacggctacctatcttctgcttctagccaagaaggctcggggaaaaccagttcgtttaaggctttcttctttctcctgtggacaagccagtgctaccccattcacagacatcaagtcaaataattggagtctggaagatgtgaccgcaagtgataaaaattatgtggcgggattaatagactatgattggtgtgaagatgatttatcaacaggtgctgctactccccgaacatcacagtttaccaagtactggacagaatcaaatggggtggaatctaaatcattaactccagccttatgcagaacacctgcaaataaattaaagaacaaagaaaatgtatatactcctaagtctgctgtaaagaatgaagagtactttatgtttcctgagccaaagactccagttaataagaaccagcataagagagaaatactcactacgccaaatcgttacactacaccctcaaaagctagaaaccagtgcctgaaagaaactccaattaaaataccagtaaattcaacaggaacagacaagttaatgacaggtgtcattagccctgagaggcggtgccgctcagtggaattggatctcaaccaagcacatatggaggagactccaaaaagaaagggagccaaagtgtttgggagccttgaaagggggttggataaggttatcactgtgctcaccaggagcaaaaggaagggttctgccagagacgggcccagaagactaaagcttcactataatgtgactacaactagattagtgaatccagatcaactgttgaatgaaataatgtctattcttccaaagaagcatgttgactttgtacaaaagggttatacactgaagtgtcaaacacagtcagattttgggaaagtgacaatgcaatttgaattagaagtgtgccagcttcaaaaacccgatgtggtgggtatcaggaggcagcggcttaagggcgatgcctgggtttacaaaagattagtggaagacatcctatctagctgcaaggtataattgatggattcttccatcctgccggatgagtgtgggtgtgatacagcctacataaagactgttatgatcgctttgattttaaagttcattggaactaccaacttgtttctaaagagctatcttaagaccaatatctctttgtttttaaacaaaagatattattttgtgtatgaatctaaatcaagcccatctgtcattatgttactgtcttttttaatcatgtggttttgtatattaataattgttgactttcttagattcacttccatatgtgaatgtaagctcttaactatgtctctttgtaatgtgtaatttctttctgaaataaaaccatttgtgaatataaaaaaaaaaaaaaa

SEQ ID NO: 112 - protein, 651 aa, Homo sapiens
  misc_feature: Incyte ID No: 256716CD1
MKDYDELLKYYELHETIGTGGFAKVKLACHILTGEMVAIKIMDKNTLGSDLPRIKTEIEALKNLRHQHICQLYHVLETANKIFMVLEYCPGGELFDYIISQDRLSEEETRVVFRQIVSAVAYVHSQGYAHRDLKPENLLFDEYHKLKLIDFGLCAKPKGNKDYHLQTCCGSLAYAAPELIQGKSYLGSEADVWSMGILLYVLMCGFLPFDDDNVMALYKKIMRGKYDVPKWLSPSSILLLQQMLQVDPKKRISMKNLLNHPWIMQDYNYPVEWQSKNPFIHLDDDCVTELSVHHRNNRQTMEDLISLWQYDHLTATYLLLLAKKARGKPVRLRLSSFSCGQASATPFTDIKSNNWSLEDVTASDKNYVAGLIDYDWCEDDLSTGAATPRTSQFTKYWTESNGVESKSLTPALCRTPANKLKNKENVYTPKSAVKNEEYFMFPEPKTPVNKNQHKREILTTPNRYTTPSKARNQCLKETPIKIPVNSTGTDKLMTGVISPERRCRSVELDLNQAHMEETPKRKGAKVFGSLERGLDKVITVLTRSKRKGSARDGPRRLKLHYNVTTTRLVNPDQLLNEIMSILPKKHVDFVQKGYTLKCQTQSDFGKVTMQFELEVCQLQKPDVVGIRRQRLKGDAWVYKRLVEDILSSCKV

SEQ ID NO: 113 - DNA, 3611 bp, Homo sapiens
  misc_feature: Incyte ID No: 3267030CB1
gaccgtggagaggatcatggcggatggccccaggtgtaagcgcagaaagcaggcgaacccgcggcgcaataacgttacaaattataatactgtggtagaaacaaattcagattcagatgatgaagacaaactgcatattgtggaagaagaaagtgttacagatgcagctgactgtgaaggtgtaccagaggatgacctgccaacagaccagacagtgttaccagggaggagcagtgaaagagaagggaatgctaagaactgctgggaggatgacacaggaaaggaagggcaagaaatcctggggcctgaagctcaggcagatgaagcaggatgtacagtaaaagatgatgaatgcgagtcagatgcagaaaatgagcaaaaccatgatcctaatgttgaagagtttctacaacaacaagacactgctgtcatttttcctgaggcacctgaagaggaccagaggcagggcacaccagaagccagtggtcatgatgaaaatggaacaccagatgcattttcacaattactcacctgtccatattgtgatagaggctataaacgctttacctctctgaaagaacacattaaatatcgtcatgaaaagaatgaagataactttagttgctccctgtgcagttacacctttgcatacagaacccaacttgaacgtcacatgacatcacataaatcaggaagagatcaaagacatgtgacgcagtctgggtgtaatcgtaaattcaaatgcactgagtgtggaaaagctttcaaatacaaacatcacctaaaagagcacttaagaattcacagtggagagaagccatatgaatgcccaaactgcaagaaacgcttttcccattctggctcctatagctcacacataagcagtaagaaatgtatcagcttgatacctgtgaatgggcgaccaagaacaggactcaagacatctcagtgttcttcaccgtctctttcagcatcaccaggcagtcccacacgaccacagatacggcaaaagatagagaataaaccccttcaagaacaactttctgttaaccaaattaaaactgaacctgtggattatgaattcaaacccatagtggttgcttcaggaatcaactgttcaacccctttacaaaatggggttttcactggtggtggcccattacaggcaaccagttctcctcagggcatggtgcaagctgttgttctgccaacagttggtttggtgtctcccataagtatcaatttaagtgatattcagaatgtacttaaagtggcggtagatggtaatgtaataaggcaagtgttggagaataatcaagccaatcttgcatccaaagaacaagaaacaatcaatgcttcacccatacaacaaggtggccattctgttatttcagccatcagtcttcctttggttgatcaagatggaacaaccaaaattatcatcaactacagtcttgagcagcctagccaacttcaagttgttcctcaaaatttaaaaaaaaaaaatccagtcgctacaaacagttgtaaaagtgaaaagttaccagaagatcttactgttaagtctgagaaggacaaaagctttgaagggggggtgaatgatagcacttgtcttctgtgtgatgattgtccaggagatattaatgcacttccagaattaaagcactatgacctaaagcagcctactcagcctcctccactccctgcagcagaagctgagaagcctgagtcctctgtttcatcagctactggagatggcaatttgtctcctagtcagccacctttaaagaacctcttgtctctcctaaaagcatattatgctttgaatgcacaaccaagtgcagaagagctctcaaaaattgctgattcagtaaacctaccactggatgtagtaaaaaagtggtttgaaaagatgcaagctggacagatttcagtgcagtcttctgaaccatcttctcctgaaccaggcaaagtaaatacccctgccaagaacaatgatcagcctcaatctgcaaatgcaaatgaaccccaggacagcacagtaaatctacaaagtcctttgaagatgactaactccccagttttaccagtgggatcaaccaccaatggttccagaagtagtacaccatccccatcacctctaaacctttcctcatccagaaatacacagggttacttgtacacagctgagggtgcacaagaagagccacaagtagaacctcttgatctttcactaccaaagcaacagggagaattattagaaaggtcaactatcactagtgtttaccagaacagtgtttattctgtccaggaagaacccttgaacttgtcttgcgcaaaaaaggagccacaaaaggacagttgtgttacagactcagaaccagttgtaaatgtaatcccaccaagtgccaaccccataaatatcgctatacctacagtcactgcccagttacccacaatcgtggccattgctgaccagaacagtgttccatgcttaagagcgctagctgccaataagcaaacgattctgattccccaggtggcatacacctactcaactacggtcagccctgcagtccaagaaccacccttgaaagtgatccagccaaatggaaatcaggatgaaagacaagatactagctcagaaggagtatcaaatgtagaggatcagaatgactctgattctacaccgcccaaaaagaaaatgcggaagacagaaaatggaatgtatgcttgtgatttgtgtgacaagatattccaaaagagtagttcattattgagacataaatatgaacacacaggtaaaagacctcatgagtgtggaatctgtaaaaaggcatttaaacacaaacatcatttgattgaacacatgcgattacattctggagaaaagccctatcaatgtgacaaatgtggaaagcgcttctcacactctgggtcttattctcaacacatgaatcatcgctactcctactgtaagagagaagcggaagaacgtgacagcacagagcaggaagaggcagggcctgaaatcctctcgaatgagcacgtgggtgccagggcgtctccctcacagggcgactcggacgagagagagagtttgacaagggaagaggatgaagacagtgaaaaagaggaagaggaggaggataaagagatggaagaattgcaggaagaaaaagaatgtgaaaaaccacaaggggatgaggaagaggaggaggaggaggaagaagtggaagaagaagaggtagaagaggcagagaatgagggagaagaagcaaaaactgaaggtctgatgaaggatgacagggctgaaagtcaagcaagcagcttaggacaaaaagtaggcgagagtagtgagcaagtgtctgaagaaaagacaaatgaagcctaatcgtttttctagaaggaaaataaattctaattgataatgaatttcgttcaatattatccttgcttttcatggaaacacagtaacctgtatgctgtgattcctgttcactactgtgtaaagtaaaaactaaaaaaatacaaaatacaaaacacacacacacacacacacacacacacacacacacacacaaaataaatccgggtgtgcctgaacctca

SEQ ID NO: 114 - protein, 1125 aa, Homo sapiens
  misc_feature: Incyte ID No: 3267030CD1
MADGPRCKRRKQANPRRNNVTNYNTVVETNSDSDDEDKLHIVEEESVTDAADCEGVPEDDLPTDQTVLPGRSSEREGNAKNCWEDDTGKEGQEILGPEAQADEAGCTVKDDECESDAENEQNHDPNVEEFLQQQDTAVIFPEAPEEDQRQGTPEASGHDENGTPDAFSQLLTCPYCDRGYKRFTSLKEHIKYRHEKNEDNFSCSLCSYTFAYRTQLERHMTSHKSGRDQRHVTQSGCNRKFKCTECGKAFKYKHHLKEHLRIHSGEKPYECPNCKKRFSHSGSYSSHISSKKCISLIPVNGRPRTGLKTSQCSSPSLSASPGSPTRPQIRQKIENKPLQEQLSVNQIKTEPVDYEFKPIVVASGINCSTPLQNGVFTGGGPLQATSSPQGMVQAVVLPTVGLVSPISINLSDIQNVLKVAVDGNVIRQVLENNQANLASKEQETINASPIQQGGHSVISAISLPLVDQDGTTKIIINYSLEQPSQLQVVPQNLKKKNPVATNSCKSEKLPEDLTVKSEKDKSFEGGVNDSTCLLCDDCPGDINALPELKHYDLKQPTQPPPLPAAEAEKPESSVSSATGDGNLSPSQPPLKNLLSLLKAYYALNAQPSAEELSKIADSVNLPLDVVKKWFEKMQAGQISVQSSEPSSPEPGKVNTPAKNNDQPQSANANEPQDSTVNLQSPLKMTNSPVLPVGSTTNGSRSSTPSPSPLNLSSSRNTQGYLYTAEGAQEEPQVEPLDLSLPKQQGELLERSTITSVYQNSVYSVQEEPLNLSCAKKEPQKDSCVTDSEPVVNVIPPSANPINIAIPTVTAQLPTIVAIADQNSVPCLRALAANKQTILIPQVAYTYSTTVSPAVQEPPLKVIQPNGNQDERQDTSSEGVSNVEDQNDSDSTPPKKKMRKTENGMYACDLCDKIFQKSSSLLRHKYEHTGKRPHECGICKKAFKHKHHLIEHMRLHSGEKPYQCDKCGKRFSHSGSYSQHMNHRYSYCKREAEERDSTEQEEAGPEILSNEHVGARASPSQGDSDERESLTREEDEDSEKEEEEEDKEMEELQEEKECEKPQGDEEEEEEEEEVEEEEVEEAENEGEEAKTEGLMKDDRAESQASSLGQKVGESSEQVSEEKTNEA

SEQ ID NO: 115 - DNA, 965 bp, Homo sapiens
  misc_feature: Incyte ID No: 067386.1
  unsure 951: a, t, c, g, or other
aaatcactcatttgcaaaacaaaacagtgtacaagaacagcctggtaccgcttgtttatccaaattttcctctgcaagtggagcatctgctaggatcaatagcagcagtgttaagcaggaagctacattctgttcccaaagggatggcgatgcctctttgaataaagccctatcctcaagtgctgatgatgcgtctttggttaatgcctcaatttccagctctgtgaaagctacttcttctccagtgaaatctactacatctatcactgatgctaaaagttgtgagggacaaaatcctgagctacttccaaaaactcctattagtcctctgaaaacgggggtatcgaaaccaattgtgaagtcaactttatcccagacagttccatccaagggagaattaagtagagaaatttgtctgcaatctcaatctaaagacaaatctacgacaccaggaggaacaggaattaagcctttcctggaacgctttggagagcgttgtcaagaacatagcaaagaaagtccagctcgtagcacaccccacagaacccccattattactccaaatacaaaggccatccaagaaagattattcaagcaagacacatcttcatctactacccatttagcacaacagctcaagcaggaacgtcaaaaagaactagcatgtcttcgtggccgatttgacaagggcaatatatggagtgcagaaaaaggcggaaactcaaaaagcaaacaactagaaaccaaacaggaaactcactgtcagagcactcccctcaaaaaacaccaaggtgtttcaaaaactcagtcacttccagtaacagaaaaggtgaccgaaaaccagataccagccaaaaattctagtacagaacctaaaggtttcactgaatgcgaaatgacgaaatctagccctttggaaataacattgtttttagaagaggacaaatcctnttaagtaacatcag

SEQ ID NO: 116 - DNA, 1656 bp, Homo sapiens
  misc_feature: Incyte ID No: 903446.9
ggcttggcgggagcttccagtcgctcgagagcggagagcggcaccatggccccgcgggggcggcggcggccccggcctcacaggtctgagagcgcaagacgttcaaagaacactttagaaagaacacattccatgaaagataaagctggtcaaaagtgcaagcctattgacgtgttcgactttcctgataattctgatgtctcaagcattggcaggctgggtgaaaatgagaaagatgaagaaacttatgagacctttgatcctcctttacatagcacagctatatatgctgatgaagaagaattctccaaacattgtggactgtctctctcttcaactcctccaggaaaagaagcaaaaagaagttcagacacttctggaaatgaagcaagtgaaatcgaatctgtaaaaattagtgcaaaaaagccaggaagaaagctcaggcccattagtgatgactctgaaagcattgaagaaagtgatacaaggagaaaagttaaatcagcagagaaaataagtacacaacgtcatgaggttattcgaaccacagcgtcttcagaactttcagagaaaccagctgagtctgtcacttctaaaaagacaggaccccttagtgcccagccctctgttgaaaaagagaacttggcaatagaaagtcaatcgaaaactcagaaaaaagggaagatatctcatgacaaaaggaagaaatcaagaagtaaagccataggctcagatacttctgacattgtgcacatttggtgtccagaaggaatgaaaaccagtgacatcaaggagttgaatattgttttgcctgaatttgagaaaacccacctagagcatcaacaaagaatagaatctaaagtttgtaaggcagccatcgccacattttatgttaatgttaaagaacaattcatcaaaatgcttaaagaaagccagatgttgacaaatctgaaaaggaagaatgctaagatgatttcagatatcgaaaagaaaaggcagcgtatgattgaagtccaggatgaactgcttcggttagagccacagctgaaacaactacaaacaaaatatgatgaacttaaagagagaaagtcttcccttaggaatgcagcatatttcttatctaatttaaaacagctttatcaagattattcagatgttcaagctcaagaaccaaacgtaaaggaaacgtatgattcatccagccttccagctctgttatttaaagcaagaacacttctgggagccgaaagccatctgcgaaatatcaaccatcagttagagaagctccttgaccagggatgagaagagcagtctactaaaatgtgcctataggaagactagtctcatgctgttaccttctgaaactgtacctttataaatcaattgttttgcaaagaagttatggcctacttagaatctaaaatttgttattcaaattaaatggctgtgaacaatgttaaatagcatcagtttgtccaatagttttaaaggccataatcatcttttctggttaatatcttgagtaattttaaaatgttgacaccttaatcggtcccaggtatgagctataataaacttgtaaaattaagttgatgtgaacataattttgattaattaataaggcgatttctcctgaaatttacaccaaagctaatt

SEQ ID NO: 117 - DNA, 2901 bp, Homo sapiens
  misc_feature: Incyte ID No: 5665139CB1
accacagcgcagtctcactctgtccttcaggctgtgagtgcagtctcatgatcttggctcactgcaacctctgtctcctgggttcaagtgattcttgtgcctcagcctaccaagtagctgagatacaggattgacttctaaagactcttggtacctgaggaagaaacccagaagaggaagaggaaagcaaaggagtcggggatggctctttctcagggtctattgacattcagggacgtggccatagaattctctcaggaggagtggaaatgcctggaccctgctcagaggactctatacagagacgtgatgctggagaattataggaacctggagtctgtggggtctattgacattcagggatgtggccatagaattctctcaggaggagtggaaatgcctggaccctgctcagaggactctatacagagatgtgatgttggagaattataggaacctggtctccctgggtattttttctaaatgtgagatcaaggaattaccaccaaaaaaggagagtaatacaggagaaatattccagacagtaatgttggaaagacatgaaagccacgacatacaagatttttgcttcagagaaacccagaaaaatgtacatgactctcagtgtctgtggaaacatgattgaagacattataagcgagtgcgtgtgacctataaggaaagtctcattggtagaagagacatgcatggtagaaaggatgatgcacaaaagcagcctgttaaaaatcagcttggattaaacccgcagtcacatctaccagaactgcagctatttcaagctgaagggaaaatatataaatatgatcacatggaaaaatctgtcaacagtagttccttagtttccccaccccaacgtatttcttctactgtcaaaacccacatttctcatacatatgaatgtaattttgtggattcattattcacacaaaaagagaaagcaaatattgggacagaacactacaaatgtaatgagcgtggcaaggcctttcatcaaggcttacattttactatacatcaaataatccatactaaagagacgcaatttaaatgtgatatatgtggcaagatcttcaataaaaaatcaaaccttgcaagtcatcaaagaattcatactggagagaagccatataaatgtaatgaatgtggcaaggtcttccataatatgtcacaccttgcacagcatcgcaggattcatactggagagaaaccatataaatgtaatgaatgtggcaaggtctttaatcaaatttcacaccttgcacaacatcaaagaattcataccggagagaaaccttataaatgtaatgaatgtggaaaggtcttccatcaaatttcacaccttgcacaacatcggacaattcatactggagaaaaaccttacgaatgtaacaaatgtggcaaggtgttcagtcgcaattcctaccttgtacaacatctgatcattcatactggagagaaaccttacagatgtaatgtatgtggaaaggtcttccatcatatttcacaccttgcacaacatcagagaatccacactggagagaaaccttacaaatgtaatgagtgtggcaaggtcttcagtcacaagtcatccctagtaaatcactggagaattcatactggagagaaaccttacaaatgtaatgagtgtggcaaggtcttcagtcacaagtcatccctagtaaatcactggagaatccacactggagagaaaccttacaaatgtaatgaatgtggcaaggtcttcagtcgcaattcataccttgcccaacatctgataattcatgccggtgagaaaccttataagtgtgatgaatgtgacaaagcattcagtcaaaattcacatcttgtacaacatcacagaatccatactggagagaaaccttacaaatgtgatgaatgtggcaaagtcttcagtcaaaattcataccttgcatatcattggagaattcatactggagaaaaagcttataaatgtaatgaatgtgggaaggtcttcggtctaaactcatccctagcacatcatcggaaaattcacactggagagaaacctttcaaatgtaatgaatgtggcaaagcttttagtatgcgttcaagcctcactaatcatcatgcgatccacactggagagaaacatttcaaatgtaatgaatgtggcaaactcttccgcgacaattcatatcttgtacgtcatcagagatttcatgccggaaagaaatctaacacatgtaattaatgtggcagagtgttcagttagcattaaagccttgtaagacatacaataatttatactggagaaaaactttgcaagtataatgaatgtagcagagcctttagtttttgttcaaggcttaataaccgttagctagaccatagaggacagaaactttactaatgtactgaatgtggcaaggtcttaaggtaaaatctgagaccaggatttttcaaagaattcttgctggtgagaaacctaacaaatgtaatgaatgtggcaaggtcttctggcacaattctcacattgtacaatattgcaaaaattcatgcttgagagaaacaaaaacactgagagtgggaaaccattatgacttcaaacattcatcaacatcagagaatccatactaaagagcatttataataattatatgtgatagagattttccgcaggccaaagtctcactaggcatcaaaaacttttttgatgaaaccatacaaatgtaacgtgcatgcttaagcttttacccaggcatcaaaaccggaacatcacagggtttatactggagagtaactacacaaagataatgtaataagcctttcagtgtaatattcatgattttgtcgtgagagatccactcaataaaaaccaggcaaatgtaaaaaaaaaaa

SEQ ID NO: 118 - protein, 516 aa, Homo sapiens [sequence omitted]

SEQ ID NO: 119 - DNA, 3035 bp, Homo sapiens
  misc_feature: Incyte ID No: 154697CB1
aagagtgcagctgcctgaaccgagccctgccgaacagctgagaattgcactgcaaccatgagtgagaacaataagaattccttggagagcagcctacggcaactaaaatgccatttcacctggaacttgatggagggagaaaactccttggatgattttgaagacaaagtattttaccggactgagtttcagaatcgtgaattcaaagccacaatgtgcaacctactggcctatctaaagcacctcaaagggcaaaacgaggcagccctggaatgcttacgtaaagctgaagagttaatccagcaagagcatgctgaccaggcagaaatcagaagtctggtcacctggggaaactatgcctgggtctactatcacatgggccgactctcagacgttcagatttatgtagacaaggtgaaacatgtctgtgagaagttttccagtccctatagaattgagagtccagagcttgactgtgaggaagggtggacacggttaaagtgtggaggaaaccaaaatgaaagagcgaaggtgtgctttgagaaggctctggaaaagaagccaaagaacccagaattcacctctggactggcaatagcaagctaccgtctggacaactggccaccatctcagaacgccattgaccctctgaggcaagccattcggctgaatcctgacaaccagtaccttaaagtcctcctggctctgaagcttcataagatgcgtgaagaaggtgaagaggaaggtgaaggagagaagttagttgaagaagccttggagaaagccccaggtgtaacagatgtacttcgcagtgcagccaagttttatcgaagaaaagatgagccagacaaagcgattgaactgcttaaaaaggctttagaatacataccaaacaatgcctacctgcattgccaaattgggtgctgctatagggcaaaagtcttccaagtaatgaatctaagagagaatggaatgtatgggaaaagaaagttactggaactaataggacacgctgtggctcatctgaagaaagctgatgaggccaatgataatctcttccgtgtctgttccattcttgccagcctccatgctctagcagatcagtatgaagacgcagagtattacttccaaaaggaattcagtaaagagcttactcctgtagcgaaacaactgctccatctgcggtatggcaactttcagctgtaccaaatgaagtgtgaagacaaggccatccaccactttatagagggtgtaaaaataaaccagaaatcaagggagaaaaaaaagatgaaagacaaactgcaaaaaattgccaaaatgcgactttctaaaaatggagcagattctgaggctttgcatgtcttggcattccttcaggagctgaatgaaaaaatgcaacaagcagatgaagactctgagaggggtttggagtctggaagcctcatcccttcagcatcaagctggaatggggaatgaagaatagagatgtggtgcccactaggctactgctgaaagggagctgaaattcctccaccaagttggtattcaaaatatgtaatgactggtatggcaaaagattggactaagacactggccataccactggacagggttatgttaacacctgaattgctgggtcttgagagagcccaaggagttctgggagagggaccagattggggggtaggtccacgggcttggtgatagaattatttctcgattgacttcttgagtgcaatttgaactgtaacatttgcttagtcacctttagtggagtaatctactgggcttgtttctatatttatataaagcagccaaatccttcatgtaatattgaagtccatttttgcaatgttgttccatacttggagtcattttgcatcccatagaggttagtcctgcatagccagtaatgtgctaagttcatccaaaagctggcggaccaaagtctaaatagggctcagtatcccccatcgcttatctctgcctccttcctcctccttcccagtctatcatcaaccttgagtattctacacaatgtgaattcaagtgcctgattaattgaggtggcaacatagtttgagacgagggcagagaacaggaagatacatagctagaagcgacgggtacaaaaagcaatgtgtacaagaagactttcagcaagtatacagagagttcacctctactctgccctcctcatagtcataatgtagcaagtaaagaatgagaatggattctgtacaatacactagaaaccaacataatgtatttctttaaaacctgtgtgaaaaaataaatgttccaccagtagggataggggaaaagtaaccaaaagagagaaagagaaaggaatgctggtttatctttgtagattgtaatcgaatggagaaatttgcagtattttagccactattaggaattttttttttttgtaaaatgaagactgaactctgttcaaatgctttcatgaacctggtttgagacggtaggaaagcaacaaaacgtgggaacctggtgactaagggcctggtgcaaggacttgggaaatgtcattgataatagatggtggggttttcccccctttagaaatgttggatattaagtgatataaacacttcttttaactccgaaaatcttctgagaaatcacaaaattcacggtatgcttggaacgattgagattttctaggtagatgctgaatagcctagacatcaaagttggtgtgaaccaaaatagagtcagctgacccagcatcagccacactctgggttggaaaatgtttgcctgttggaattaatttaagcttaagtatatatcaacattattttattgtgcaattaaaacaatacaaattcatggttttttaaagttaaaaattctaaccactgtaacaacagtttttgtgttattttctgtattaaacatcttgttgcacgcatttgaggtcatcagggtgcaaaatttgtattcctgaaaatgtcatatattttcattaataaataacctaaatatgataaaacaaaaaaaaaaaaaaa

SEQ ID NO: 120 - protein, 472 aa, Homo sapiens
  misc_feature: Incyte ID No: 154697CD1
MSENNKNSLESSLRQLKCHFTWNLMEGENSLDDFEDKVFYRTEFQNREFKATMCNLLAYLKHLKGQNEAALECLRKAEELIQQEHADQAEIRSLVTWGNYAWVYYHMGRLSDVQIYVDKVKHVCEKFSSPYRIESPELDCEEGWTRLKCGGNQNERAKVCFEKALEKKPKNPEFTSGLAIASYRLDNWPPSQNAIDPLRQAIRLNPDNQYLKVLLALKLHKMREEGEEEGEGEKLVEEALEKAPGVTDVLRSAAKFYRRKDEPDKAIELLKKALEYIPNNAYLHCQIGCCYRAKVFQVMNLRENGMYGKRKLLELIGHAVAHLKKADEANDNLFRVCSILASLHALADQYEDAEYYFQKEFSKELTPVAKQLLHLRYGNFQLYQMKCEDKAIHHFIEGVKINQKSREKKKMKDKLQKIAKMRLSKNGADSEALHVLAFLQELNEKMQQADEDSERGLESGSLIPSASSWNGE

SEQ ID NO: 121 - DNA, 3887 bp, Homo sapiens
  misc_feature: Incyte ID No: 2161632CB1
  unsure 3873: a, t, c, g, or other
gggaaaagagtaaacgcgcgactccagcgcgcggctacctacgcttggtgcttgctttctccagccatcggagaccagagccgccccctctgctcgagaaaggggctcagcggcggcggaagcggagggggaccaccgtggagagcgcggtcccagcccggccactgcggatccctgaaaccaaaaagctcctgctgcttctgtaccccgcctgtccctcccagctgcgcagggccccttcgtgggatcatcagcccgaagacagggatggagaggcctctgtgctcccacctctgcagctgcctggctatgctggccctcctgtcccccctgagcctggcacagtatgacagctggccccattaccccgagtacttccagcaaccggctcctgagtatcaccagccccaggcccccgccaacgtggccaagattcagctgcgcctggctgggcagaagaggaagcacagcgagggccgggtggaggtgtactatgatggccagtggggcaccgtgtgcgatgacgacttctccatccacgctgcccacgtcgtctgccgggagctgggctacgtggaggccaagtcctggactgccagctcctcctacggcaagggagaagggcccatctggttagacaatctccactgtactggcaacgaggcgacccttgcagcatgcacctccaatggctggggcgtcactgactgcaagcacacggaggatgtcggtgtggtgtgcagcgacaaaaggattcctgggttcaaatttgacaattcgttgatcaaccagatagagaacctgaatatccaggtggaggacattcggattcgagccatcctctcaacctaccgcaagcgcaccccagtgatggagggctacgtggaggtgaaggagggcaagacctggaagcagatctgtgacaagcactggacggccaagaattcccgcgtggtctgcggcatgtttggcttccctggggagaggacatacaataccaaagtgtacaaaatgtttgcctcacggaggaagcagcgctactggccattctccatggactgcaccggcacagaggcccacatctccagctgcaagctgggcccccaggtgtcactggaccccatgaagaatgtcacctgcgagaatgggctaccggccgtggtgagttgtgtgcctgggcaggtcttcagccctgacggaccctcgagattccggaaagcgtacaagccagagcaacccctggtgcgactgagaggcggtgcctacatcggggagggccgcgtggaggtgctcaaaaatggagagtgggggaccgtctgcgacgacaagtgggacctggtgtcggccagtgtggtctgcagagagctgggctttgggagtgccaaagaggcagtcactggctcccgactggggcaagggatcggacccatccacctcaacgagatccagtgcacaggcaatgagaagtccattatagactgcaagttcaatgccgagtctcagggctgcaaccacgaggaggatgctggtgtgagatgcaacacccctgccatgggcttgcagaagaagctgcgcctgaacggcggccgcaatccctacgagggccgagtggaggtgctggtggagagaaacgggtcccttgtgtgggggatggtgtgtggccaaaactggggcatcgtggaggccatggtggtctgccgccagctgggcctgggattcgccagcaacgccttccaggagacctggtattggcacggagatgtcaacagcaacaaagtggtcatgagtggagtgaagtgctcgggaacggagctgtccctggcgcactgccgccacgacggggaggacgtggcctgcccccagggcggagtgcagtacggggccggagttgcctgctcagaaaccgcccctgacctggtcctcaatgcggagatggtgcagcagaccacctacctggaggaccggcccatgttcatgctgcagtgtgccatggaggagaactgcctctcggcctcagccgcgcagaccgaccccaccacgggctaccgccggctcctgcgcttctcctcccagatccacaacaatggccagtccgacttccggcccaagaacggccgccacgcgtggatctggcacgactgtcacaggcactaccacagcatggaggtgttcacccactatgacctgctgaacctcaatggcaccaaggtggcagagggccacaaggccagcttctgcttggaggacacagaatgtgaaggagacatccagaagaattacgagtgtgccaacttcggcgatcagggcatcaccatgggctgctgggacatgtaccgccatgacatcgactgccagtgggttgacatcactgacgtgccccctggagactacctgttccaggttgttattaaccccaacttcgaggttgcagaatccgattactccaacaacatcatgaaatgcaggagccgctatgacggccaccgcatctggatgtacaactgccacataggtggttccttcagcgaagagacggaaaaaaagtttgagcacttcagcgggctcttaaacaaccagctgtccccgcagtaaagaagcctgcgtggtcaactcctgtcttcaggccacaccacatcttccatgggacttccccccaacaactgagtctgaacgaatgccacgtgccctcacccagcccggcccccaccctgtccagacccctacagctgtgtctaagctcaggaggaaagggaccctcccatcattcatggggggctgctacctgacccttggggcctgagaaggccttgggggggtggggtttgtccacagagctgctggagcagcaccaagagccagtcttgaccgggatgaggcccacagacaggttgtcatcagcttgtcccattcaagccaccgagctcaccacagacacagtggagccgcgctcttctccagtgacacgtggacaaatgcgggctcatcagcccccccagagagggtcaggccgaaccccatttctcctcctcttaggtcattttcagcaaacttgaatatctagacctctcttccaatgaaaccctccagtctattatagtcacatagataatggtgccacgtgttttctgatttggtgagctcagacttggtgcttccctctccacaacccccaccccttgtttttcaagatactattattatattttcacagacttttgaagcacaaatttattggcatttaatattggacatctgggcccttggaagtacaaatctaaggaaaaaccaacccactgtgtaagtgactcatcttcctgttgttccaattctgtgggtttttgattcaacggtgctataaccagggtcctgggtgacagggcgctcactgagcaccatgtgtcatcacagacacttacacatacttgaaacttggaataaaagaaagatttatgaaacgtgtctgtgtttcctttgacccacagcacctgggccctgagcagcaggcttcctatgttcagtggccagaagcagagcttcaggtacattcatggttttctccggtggacatgggtcctcagatcccctccagcccagtgtggccaccagggcacctccttcaatagactccaaaaggggcagctcctaccatctgggagaagcagtctaaggagatcacaaaaagtaacggaacaggagtcataatctttcttgaactcctgtggtttttactgaaacttgtcagaaggcataggagttgtgcgagggctggatgggaagtctagatttaaacagccaccaggcagcttatcaaagcaagagggcatccgttcacaggacaggggctccagcaattccagtggcagtggtggttgnggtttggctggccc

SEQ ID NO: 122 - protein, 774 aa, Homo sapiens
  misc_feature: Incyte ID No: 2161632CD1
MERPLCSHLCSCLAMLALLSPLSLAQYDSWPHYPEYFQQPAPEYHQPQAPANVAKIQLRLAGQKRKHSEGRVEVYYDGQWGTVCDDDFSIHAAHVVCRELGYVEAKSWTASSSYGKGEGPIWLDNLHCTGNEATLAACTSNGWGVTDCKHTEDVGVVCSDKRIPGFKFDNSLINQIENLNIQVEDIRIRAILSTYRKRTPVMEGYVEVKEGKTWKQICDKHWTAKNSRVVCGMFGFPGERTYNTKVYKMFASRRKQRYWPFSMDCTGTEAHISSCKLGPQVSLDPMKNVTCENGLPAVVSCVPGQVFSPDGPSRFRKAYKPEQPLVRLRGGAYIGEGRVEVLKNGEWGTVCDDKWDLVSASVVCRELGFGSAKEAVTGSRLGQGIGPIHLNEIQCTGNEKSIIDCKFNAESQGCNHEEDAGVRCNTPAMGLQKKLRLNGGRNPYEGRVEVLVERNGSLVWGMVCGQNWGIVEAMVVCRQLGLGFASNAFQETWYWHGDVNSNKVVMSGVKCSGTELSLAHCRHDGEDVACPQGGVQYGAGVACSETAPDLVLNAEMVQQTTYLEDRPMFMLQCAMEENCLSASAAQTDPTTGYRRLLRFSSQIHNNGQSDFRPKNGRHAWIWHDCHRHYHSMEVFTHYDLLNLNGTKVAEGHKASFCLEDTECEGDIQKNYECANFGDQGITMGCWDMYRHDIDCQWVDITDVPPGDYLFQVVINPNFEVAESDYSNNIMKCRSRYDGHRIWMYNCHIGGSFSEETEKKFEHFSGLLNNQLSPQ

SEQ ID NO: 123 - DNA, 1222 bp, Homo sapiens
  misc_feature: Incyte ID No: 289671.44
cttgcaggacggagtcttggccgcacactgagcctatacctcacccgtctcccaccaactcttggtactggatgcagccatgctgggcagctctatggaggcctggcgggctagcttgggggtctggccagcagtcctttcacagctggggagtggagtctgggcctgaggtctcctgtgcgcctcttctgggaacccatgaaggttcacgacatccgctggaactttgagaagttcctggtggggccagatggtatacccatcatacgctggcaccaccggaccacggtcagcaacgtcaagatggacatcctgtcctacatgaggcggcaggcagccctgggggtcaagaggaagtaactgaaggccgtctcatcccatgtccaccatgtaggggagggactttgttcaggaagaaatccgtgtctccaaccacactatctacccatcacagacccctttcctatcactcaaggccccagcctggcacaaatggatgcatacagttctgtgtactgccaggcatgtgggtgtgggtgcatgtgggtgtttacacacatgcctacaggtatgcgtgattgtgtgtgtgtgcatgggtgtacagccacgtgtctacctatgtgtctttctgggaatgtgtaccatctgtgtgcctgcagctgtgtagtgctggacagtgacaaccctttctctccagttctccactccaatgataatagttcacttacacctaaacccaaaggaaaaaccagctctaggtccaattgttctgctctaactgatacctcaaccttggggccagcatctcccactgcctccaaatattagtaactatgactgacgtccccagaagtttctgggtctaccacactccccaaccccccactcctacttcctgaagggccctcccaaggctacatccccaccccacagttctccctgagagagatcaacctccctgagatcaaccaaggcagatgtgacagcaagggccacggaccccatggcaggggtggcgtcttcatgagggaggggcccaaagcccttgtgggcggacctcccctgagcctgtctgaggggccagcccttagtgcattcaggctaaggcccctgggcagggatgccacccctgctccttcggaggacgtgccctcacccctcactggtccactggcttgagactcaccccgtctgcccagtaaaagcctttctgcagcagctg

SEQ ID NO: 124 - DNA, 7032 bp, Homo sapiens
  misc_feature: Incyte ID No: 474916.2
  unsure 3880-3917: a, t, c, g, or other
ggcgagcggctgtgggagagcgggcggcgggccggcgggcggaccgggccggtgctggagaagtttgcgctgcggttcgtgagcgcagggtgcgggccccgccggccgctgcgcgcccgctgccatggctttccgcaggaggacgaaaagttacccgctcttcagccaggagttcgtcatccacaaccatgcggacatcggcttctgcctggtgctctgcgtcctcatcgggcttatgttcgaggtcacagccaagactgcctttctatttattttacctcagtataacattagcgtgcctacagcagacagtgagaccgtgcactaccactatggccctaaggacctggtcacaatcttgttctacatcttcatcaccatcatcttgcatgctgtggttcaggagtacattttagataaaatcagcaaacggcttcatctctccaaagtcaaacacagcaagttcaatgaatctggacagctggtcgtctttcatttcacctcggtgatttggtgcttctacgtggtggtgacggaaggatacttaacaaacccaagaagcctctgggaagactacccgcatgtgcacctccccttccaggtgaagtttttctacctatgccagctggcctactggctgcacgcacttcctgagctatacttccagaaggtacggaaggaggaaattccccgccagctccagtatatttgcctgtacctggtgcatatagctggagcatacctcttaaacctgagccgcctgggcctgatcttgctgctgctgcagtactcaactgagttcctcttccacacggctagactcttctactttgcagatgaaaacaacgagaaactgttcagtgcctgggctgctgtttttggggttacccgcctcttcatcctcacccttgccgtgctggccattggctttggactggctcgcatggaaaaccaggcatttgatcccgagaaagggaacttcaacactttgttttgcaggctctgcgtgctgctgctggtgtgtgccgcccaggcctggctcatgtggcgcttcatccactcccagctgcggcactggcgggaatactggaatgagcagagtgcaaagcggagagtcccagccacacccagactaccagccaggctcatcaagagggaatctggttaccatgaaaatggagtggtgaaggcagagaacggaacctccccacggactaagaaactcaagtctccctaaggccaaagtgctaagaacaggaatcctcttggtgggggccgagcagggggcaaggagcccaggccccctccctgcctcctccttcctgcctgtgatgctccgtctcaaacagccgaaacctgtcttgcaatggggggagggggcgtttcgctttccttcttcttggcttcctcttattcttccacaaaccattctcaataaagccaaaaatctttctctttctccccctcaggccacctcctgtcctcactcctgtcctgtgctggcttttctggaacgccaggcgcccatggctggcacctttctgcttgctctgtttcttgccttatggctgctgcttttcctttttacttcctattttcaccttatcttgcaatttttctgtctgatttttacacatgggagcgggagctaagattgcagtcctgtccttcggtcccccagggcctgccggtcagaagcctggggctggtaggcccttggtggtcctcactgtgcgatgggcaagaagagagcggccatctcggatcataatctccttggtgctgattaactgacgagatatatgattccagttctgcatgtaccatcttgaggcacagcagccactgctcgttgtaaatgccaaggcatttggctttgggacgtgacaactcaatccagaaggatggtgtgaactcggttgggtcccgtgactcgagctcctaccagtggctggccgcggattggaagccagcctgctgtcgctctgtgggggggacatgtcttcccactgcttagagcgagagcagagcaaactgcgcagcaggcacctccagaaaggtaatggtggcagaacccacagtggagtcgacctaggcctttctccagcagtcccagtcgccattgctttttcagccattcacaagcattcaaaaccaaaccaaacagcagttcatatacctgcctgagataggctggtcctcacctccagagccagccagccccgtcaggggccaaacttactaccttgacttcatctctagctgcagaaacactaagtctcaagggcttcagccccatgctggtcccttggtgttcagggagggtcacttggaccgctgttcatctggccgcccttgttgagtgttctttggaattgtcgttttttgagcacaactacagcattttagactgcatgaaaccatgactgactgagagtcactctctgggtagatgataggcgcctttctggccccttccctcacagattctttcccctcccctccacctgaagagaaggcctccaagtccttttggtgccttgtgaggacttttagaaggggcgttcagctttaaaaagccggtcctaattacggccggacgcagtagcttacgcctgttatcccagcactttgggaggtcgaggtgggcagatcacctgaggttaggagttcaagaccagcctggccaacatggtgaaaccccatctctactaaaaatacaaaaaattaggtgtagtggcaggcacctgtaatcccagctactcgggaggctgaggcaggagaatcgcttgaacctagaaggtggaggttgcagtgagcggagattgtaccatggcactccagcctggacaacaagagcgaaattctgtctaaaaaaacaaaagtcccaattaagaacctccgaactctgttttgaggcaaaggggagtagttcttggtaggtgcaggaatagtagtgtcatttggaatactggtcatctttctgacatcacagtagaaaccaaaccttggatttagattcaaaaggagggaaatgggtcttttcatcaaggcaactccccttctccaagtcacttacatcatagataaattttagcttcccagtaactgagggatttgtttcctaacgccattggaggccttcatccctctctacgataaggttgcagaaatgggaagagctacccgtggttgcttttgattacccttaggaagtgagacagtgtttttgaaaatatgtatttctcccatttctccctctccttccctgacacttctctgggctgcacagcagaaacgttggtaaaagggcagtttggtttcaacacagcagacctgatatgggatcccttagccactttagtcaaacagccctgacagagtctataattgagttcaggccccccaccttgcctaataactgcaaatcgcatgttcagccagcagcctcctaagcccaccttcctcccccattagagaacacccatcctaggtgctctccaggctgtgtcattggcagggcttcacatgcaggaggcctctctcaggtgagtccaggttaaactgttgagttgtggcttcaacagatatgtatggcatgctgggatgtgccaggtgcctgcgttgtgccagttgctggagaggtagtgtgagcagagcagctgaaatcttgccatcaagcaaccctcattctcatgcctgtaggtttccattgctctgtcccaggacacttgcgtgccagagacgccacaacttcatgtccctgtctcttgcaagctccccgtgctgccagtacttcatgccttggatgtggtcccaccagcccagtggccggggtcagcttaggctctgcttcccagtggacgggtgtgctaagggnnnnnnnnnnnnnnnnnnnnnnnnnnnnnnnnnnnnnnccctgagaccatgagtggggctggcatcttgccagcctgggcttcagggatgtttggggggggtggttagagggtagttgtagggtactttgtcacccccctccccctgccaccctccctggcacgtttatttcacagcagagccaagtctgtggcaggttgacacagactgtgttgccagagctgaaataattccacttcatcctatgagcgtgttgggctagcttgttctaattttggccactttggctgttttcttcagttttatgcattctctcctgccccaaagtgccaagccatttgtgaaggctctgccagacacctccaagcttgagagctcagcaccatgcaccaagagcaggagaaaagacgtaaacctaccccagcaactgtggcctctcgacagccctggctaactaacttacatttgtggggaagccaacagacacagcaggaggagagggaggtggcgctggtggaccaaggatctgtgctacccgctcccctccttggaggtgcagtgatgatgggagttatttttaccatccgggcgctgatagctgcactattaataaattgcatgtgttccttttgaaggtaggggatggttctgggtgagaggggagcaggctgagccggcgggggatctgctgtcctcccttttgagtcagttctaatcccatgtgtgtctgggccaccagaccgaaatggttgctgagaaacttgtctgttcatgtcccaaggcataacttcccaacatttaagaaaccccaatagacacctctgccctggccacgttcacagatccttctcttgaccggaaaccctgggaccctaagaacccctgaagcttggggtgggtgtgtgcttctggggtctcttttgggacctcctttgtcagtaccccttcttttttctaagcagctaataagaggttgggtgaaagagtgcatctcctcccaggattccacaacaaaattcttatcttccatggatgctttaattggaagtgggttgccgacccccttgtgcctagaaaaggcctttgcttgggtttcctttgtatgcttcagccttcctagttggtttttctaggcctggtgtgagaggtagggaagtctgcacataactaattcttttgcttaagggcctatggcacaagtgcacaaacttcaattcttgatgttctaagctctctcctctaacagagggagtgctgaaagcttttgagtcaagacaatggagtgctcttcctccctcactctgccttccgagcttatggttccttttctcaggagaggattttcaggattattggaggattaggtcattgtcagatgactggaaaacctaaataggatctctctccagctcaaggttgtcccagtgaggaagactttaccaacttctcactctaccccactactcacatgagtgttagctccaccttgcaaaggctgaagaccagttctccccagtgaaagctgcctcattcttttatggagttccctggagtggcagagctataaagacgagcattgggatttgcagtctccatgtagcctttcgtgcttggcaacccctgtagactttttgtcccaagcagattgcgtgcgtgcgcctgtgtgtgagaataagtgccttactttgctgtgtggttttcaacttgtactccgtggccagcccccagttgccagggctcgacggcagccaaggacaccatacctcagtatagttatatataaaagggacacggattgtgacagtttcaccccatttgtttctaaccccgctgcccaggattagggtctgtggtgtgttctgttttgtttttggtttctcccttgtgtcagttctcttctggcccagctgggtggctgtggaagtctgtgaggtggcccaaccacaagcatacctattaagagaagcccagagcttccagcccccacttcgaaaactctcctctggccccacatagcaaactccttctccgttattttccccacccccagattttttttaaaaggcccacttgccgtaacctcttttggtctattttgcttcccattcagcccaaagtttatatgataaaggtgtttacttttacttcccagtctccaagtgctaacacataaacacatacatgtctgactgttgcagaactgttcgagctcctaattcagtgttaccttgttttagtcgcagcaaccctctcccctaccccttgcccgcccacgtttttctcactcttccgggttgtgcaataactctcccagccagtggtcctttccacagcctttctgtcccttaaaacacctgcaactgggggagaaatgggacccatgggagggggagtcgtcatcccttacacaagaaatagccactttccttttgttgtcattcttgtgatcctgggtgggtttctgtggcactcttttagaacatgtagcatcatcttagaggtctatttttaaaaaatgtgttgaagaggaaaaaaccattctcacgatggggcttaagtcattgtccaggaataagattggcgtggtgcccatgacatcaccgtcactctgcctaaaagcactctagagctacttgttcacgtggagaggaaggatattttgcgaagcaacagccgcaggtggagagccctgttcacctgatagggtctagctgtgacagtaaatataataccgctgtttccttgggtacagatttgagtgttcatgtgatgagactgtaaacctcatttttcggttcctctgtttaaaaaaacatctgaaggatgaactaaggctgctggtgccctgagcaactgataatgcaaatgtggacaaagtgtctgttttctactctagcctgttcatatggaccaaatttcaacaaggaactcaaggaaaatttgtacctgtcgtatttatgctttcatgtaaaaaagggttggggggaggggtgtctttttgcttttggtgaactttttttcaaaatcatttttccactgtttctgtctggttttaaaacaaattacagttttgtatggattttttaaatgtacattttggaacaaatgatcaaatattttctgaaataacaataaaaggcagaaaattataaa

SEQ ID NO: 125 - DNA, 798 bp, Homo sapiens
  misc_feature: Incyte ID No: 029618.1
atcggaaagttggcggggctgcgggagctgagcctagagtccggctgttggctagagtgggcgcggatctggtgtggggaaggcggcgggactcaggcctgcctgcgaagcattgtcctacataatggtagaggacgaactggcacttttcgataaaagcataaatgaattttggaataaattcaaaagtacggacacctcctgtcagatggcgggactaagagatacctacaaggattccatcaaagcatttgcagaaaagctgtctgtgaaattaaaggaagaagaacgaatggttgagatgtttctggaatatcaaaatcagatcagcaggcaaaataagctcattcaagaaaaaaaggataacttgttaaaattgattgctgaagtaaaaggcaaaaagcaggaattggaagtactgactgcaaatatccaggatcttaaggaagaatattctaggaagaaggaaactatttctactgctaataaagcgaatgcagagaggttgaaaaggctgcagaaatctgcagacttgtataaagatcgacttggactagaaattcgaaaaatttatggtgagaaattgcagtttattttcactaatattgaccctaagaatcctgagagcccatttatgttttccttacatctcaatgaagcaagggactatgaagtgtcagatagtgcccctcatcttgagggcctagcagaatttcaagagaatgtaaggaagaccaacaatttttcagcttttcttgccaatgttcggaaagcttttactgccacggtttataatta

SEQ ID NO: 126 - DNA, 509 bp, Homo sapiens
  misc_feature: Incyte ID No: 064516CB1
gagttgtgagggtgtgagggtcgcgttcctgctgtctggactttttctgtcccactgagacgcagctgtgtgaaatatgatttggcgaggaagatcaacatataggcctaggccgaggagaagtgtaccacctcctgagctgattgggcctatgctggagcccggtgatgaggagcctcagcaagaggaaccaccaactgaaagtcgggatcctgcacctggtcaggagagagaagaagatcagggtgcagctgagactcaagtgcctgacctggaagctgatctccaggagctgtctcagtcaaagactgggggtgaatgtggaaatggtcctgatgaccaggggaagattctgccaaaatcagaacaatttaaaatgccagaaggaggtgacaggcaaccacaggtttaaatgaagacaagctgaaacaacacaaaactgtttttatctaagatatttgacttaaaaatatcaaaataaacttttgcagctttctccaaaaaaaaaa

SEQ ID NO: 127 - protein, 111 aa, Homo sapiens
  misc_feature: Incyte ID No: 064516CD1
MIWRGRSTYRPRPRRSVPPPELIGPMLEPGDEEPQQEEPPTESRDPAPGQEREEDQGAAETQVPDLEADLQELSQSKTGGECGNGPDDQGKILPKSEQFKMPEGGDRQPQV

SEQ ID NO: 128 - DNA, 3124 bp, Homo sapiens
  misc_feature: Incyte ID No: 1331526CB1
agacgtccccggcgtcctgcgagcgccagcggccgggacgaggcggccgggagcccgggaagagcccgtggatgttctgcgcgcggcctgggagccgccgccgccgccgcctcagcgagaggaggaatgcaccggccgcgccgccgcgggacgcgcccgccgctcctggcgctgctggccgcgctgctgctggccgcacgcggggctgctgcccaagaaacagagctgtcagtcagtgctgaattagtgcctacctcatcatggaacatctcaagtgaactcaacaaagattcttacctgacccttgatgaaccaatgaataacatcaccacgtctctgggccagacagcagaactgcactgcaaagtctctgggaatccacctcccaccatccgctggttcaaaaatgatgctcctgtggtccaggagccccggaggctctcctttcggtccaccatctatggctctcggctgcggattagaaacctcgacaccacagacacaggctacttccagtgcgtggcaacaaacggcaaggaggtggtttcttccactggagtcttgtttgtcaagtttggcccccctcccactgcaagtccaggatactcagatgagtatgaagaagatggattctgtcagccatacagagggattgcatgtgcaagatttattggcaaccgcaccgtctatatggagtctttgcacatgcaaggggaaatagaaaatcagatcacagctgccttcactatgattggcacttccagtcacttatctgataagtgttctcagttcgccattccttccctgtgccactatgccttcccgtactgcgatgaaacttcatccgtcccaaagccccgtgacttgtgtcgcgatgaatgtgaaatcctggagaatgtcctgtgtcaaacagagtacatttttgcaagatcaaatcccatgattctgatgaggctgaaactgccaaactgtgaagatctcccccagccagagagcccagaagctgcgaactgtatccggattggaattcccatggcagatcctataaataaaaatcacaagtgttataacagcacaggtgtggactaccgggggaccgtcagtgtgaccaaatcagggcgccagtgccagccatggaattcccagtatccccacacacacactttcaccgcccttcgtttcccagagctgaatggaggccattcctactgccgcaacccagggaatcaaaaggaagctccctggtgcttcaccttggatgaaaactttaagtctgatctgtgtgacatcccagcttgcgattcaaaggattccaaggagaagaataaaatggaaatcctgtacatactagtgccaagtgtggccattcccctggccattgctttactcttcttcttcatttgcgtctgtcggaataaccagaagtcatcgtcggcaccagtccagaggcaaccaaaacacgtcagaggtcaaaatgtggagatgtcaatgctgaatgcatataaacccaagagcaaggctaaagagctacctctttctgctgtacgctttatggaagaattgggtgagtgtgcctttggaaaaatctataaaggccatctctatctcccaggcatggaccatgctcagctggttgctatcaagaccttgaaagactataacaacccccagcaatggatggaatttcaacaagaagcctccctaatggcagaactgcaccaccccaatattgtctgccttctaggtgccgtcactcaggaacaacctgtgtgcatgctttttgagtatattaatcagggggatctccatgagttcctcatcatgagatccccacactctgatgttggctgcagcagtgatgaagatgggactgtgaaatccagcctggaccacggagattttctgcacattgcaattcagattgcagctggcatggaatacctgtctagtcacttctttgtccacaaggaccttgcagctcgcaatattttaatcggagagcaacttcatgtaaagatttcagacttggggctttccagagaaatttactccgctgattactacagggtccagagtaagtccttgctgcccattcgctggatgccccctgaagccatcatgtatggcaaattctcttctgattcagatatctggtcctttggggttgtcttgtgggagattttcagttttggactccagccatattatggattcagtaaccaggaagtgattgagatggtgagaaaacggcagctcttaccatgctctgaagactgcccacccagaatgtacagcctcatgacagagtgctggaatgagattccttctaggagaccaagatttaaagatattcacgtccggcttcggtcctgggagggactctcaagtcacacaagctctactactccttcagggggaaatgccaccacacagacaacctccctcagtgccagcccagtgagtaatctcagtaaccccagatatcctaattacatgttcccgagccagggtattacaccacagggccagattgctggtttcattggcccgccaatacctcagaaccagcgattcattcccatcaatggatacccaatacctcctggatatgcagcgtttccagctgcccactaccagccaacaggtcctcccagagtgattcagcactgcccacctcccaagagtcggtccccaagcagtgccagtgggtcgactagcactggccatgtgactagcttgccctcatcaggatccaatcaggaagcaaatattcctttactaccacacatgtcaattccaaatcatcctggtggaatgggtatcaccgtttttggcaacaaatctcaaaaaccctacaaaattgactcaaagcaagcatctttactaggagacgccaatattcatggacacaccgaatctatgatttctgcagaactgtaaaatgcacaacttttgtaaatgtggtatacaggacaaactagacggccgtagaaaagatttatattcaaatgtttttattaaagtaaggttctcatttagcagacatcgcaacaagtaccttctgtgaagtttcactgtgtcttaccaagcaggacagacactcggccagaaaaaaaaaaaaaaa

SEQ ID NO: 129 - protein, 937 aa, Homo sapiens
  misc_feature: Incyte ID No: 1331526CD1
MHRPRRRGTRPPLLALLAALLLAARGAAAQETELSVSAELVPTSSWNISSELNKDSYLTLDEPMNNITTSLGQTAELHCKVSGNPPPTIRWFKNDAPVVQEPRRLSFRSTIYGSRLRIRNLDTTDTGYFQCVATNGKEVVSSTGVLFVKFGPPPTASPGYSDEYEEDGFCQPYRGIACARFIGNRTVYMESLHMQGEIENQITAAFTMIGTSSHLSDKCSQFAIPSLCHYAFPYCDETSSVPKPRDLCRDECEILENVLCQTEYIFARSNPMILMRLKLPNCEDLPQPESPEAANCIRIGIPMADPINKNHKCYNSTGVDYRGTVSVTKSGRQCQPWNSQYPHTHTFTALRFPELNGGHSYCRNPGNQKEAPWCFTLDENFKSDLCDIPACDSKDSKEKNKMEILYILVPSVAIPLAIALLFFFICVCRNNQKSSSAPVQRQPKHVRGQNVEMSMLNAYKPKSKAKELPLSAVRFMEELGECAFGKIYKGHLYLPGMDHAQLVAIKTLKDYNNPQQWMEFQQEASLMAELHHPNIVCLLGAVTQEQPVCMLFEYINQGDLHEFLIMRSPHSDVGCSSDEDGTVKSSLDHGDFLHIAIQIAAGMEYLSSHFFVHKDLAARNILIGEQLHVKISDLGLSREIYSADYYRVQSKSLLPIRWMPPEAIMYGKFSSDSDIWSFGVVLWEIFSFGLQPYYGFSNQEVIEMVRKRQLLPCSEDCPPRMYSLMTECWNEIPSRRPRFKDIHVRLRSWEGLSSHTSSTTPSGGNATTQTTSLSASPVSNLSNPRYPNYMFPSQGITPQGQIAGFIGPPIPQNQRFIPINGYPIPPGYAAFPAAHYQPTGPPRVIQHCPPPKSRSPSSASGSTSTGHVTSLPSSGSNQEANIPLLPHMSIPNHPGGMGITVFGNKSQKPYKIDSKQASLLGDANIHGHTESMISAEL

SEQ ID NO: 130 - DNA, 912 bp, Homo sapiens
  misc_feature: Incyte ID No: 209569.18
  unsure 284: a, t, c, g, or other
ctggcctgtaccaagtgcagaaatagcttcccaaaggaaaaaaatgggcaacagtaccaaatgctgctgagaggtcaagaaagaagaaggctgagaactgattactgaatttggccacctggaggcacagcctccgttgctgtggcagggatcttggctgctctgcgaatcaccaacaacaagctttccaatcacgtgtttgttttccaaggtgcaggcgaggcagctatgggcattgcccacctccttgtcatggccctagagaaagaaggtgtaccgaaggnagaggccacaagaaagatctggatggtggactctaaagggctcattgtcaaggggaggagccacctgaaccatgaaaaggagatgtttgcccaagaccatcctgaagtcaactccctggaggaggtggtgaggctggtgaagcccacagccatcatagggccgagggatttttgccagtggaagtccttttaagagtgtgactctggaagatggcaagaccttcattcctgggcagggaaacaatgcttacgtgttccccggggtggcactgggagtcatcgccggcgggatccggcacatcccagatgagatcttcctcctgacagcagagcaaattgcccaggaagtctctgagcagcatctgtcccaggggagactctatccaccactcagcaccatccgagacgtgtctttgagaattgccatcaaagttctcgactacgcgtacaaacacaacctggcttcctactacccagagcctaaggacaaggaggcttttgtaagatccctggtctacactccagactatgactcctttacactggacagctacacttggcccaaggaagccatgaatgttcagacggtctgaggcagtctcagaggctagtatggggctagatgaag

SEQ ID NO: 131 - DNA, 1197 bp, Homo sapiens
  misc_feature: Incyte ID No: 3752346CB1
cccgcggattggccggaagcaggcgccgcttcgaggcccgcggaaaacgcgcgccgagacccgctcctgcagtattagttcttgcagctggtggcggcggctgaggcggcatggatctcagcgagctggagagagacaatacaggccgctgtcgcctgagttcgcctgtgcccgcggtgtgccgcaaggagccttgcgtcctgggcgtcgatgaggcgggcaggggccccgtgctgggccccatggtctacgccatctgttattgtcccctgcctcgcctggcagatctggaggcgctgaaagtggcagactcaaagaccctattggagagcgagcgggaaaggctgtttgcgaaaatggaggacacggactttgtcggctgggcgctggatgtgctgtctccaaacctcatctctaccagcatgcttgggcgggtcaaatacaacctgaactccctgtcacatgatacagccactgggcttatacagtatgcattggaccagggcgtgaacgtcacccaggtattcgtggacaccgtagggatgccagagacataccaggcgcggctgcagcaaagttttcccgggattgaggtgacggtcaaggccaaagcagatgccctctacccggtggttagtgctgccagcatctgtgccaaggtggcccgggaccaggccgtgaagaaatggcagttcgtggagaaactgcaggacttggatactgattatggctcaggctaccccaatgatcccaagacaaaagcgtggttgaaggagcacgtggagcctgtgttcggcttcccccagtttgtccggttcagctggcgcacggcccagaccatcctggagaaagaggcggaagatgttatatgggaggactcagcatccgagaatcaggagggactcaggaagatcacatcctacttcctcaatgaagggtcccaagcccgtccccgttcttcccaccgatatttcctggaacgcggcctggagtcagcaaccagcctctagcagctgcctctacgcgctctacctgcttccccaacccagacattaaaattgtttaaggagaaccacacgtaggggatgtacttttgggacagaagcaaggtgggagtgtgctctgcagccgggtccagctacttccttttggaaccttaaatagaatgggtgttggttgattaaaaaaaaaaaaaaa

SEQ ID NO: 132 - protein, 299 aa, Homo sapiens
  misc_feature: Incyte ID No: 3752346CD1
MDLSELERDNTGRCRLSSPVPAVCRKEPCVLGVDEAGRGPVLGPMVYAICYCPLPRLADLEALKVADSKTLLESERERLFAKMEDTDFVGWALDVLSPNLISTSMLGRVKYNLNSLSHDTATGLIQYALDQGVNVTQVFVDTVGMPETYQARLQQSFPGIEVTVKAKADALYPVVSAASICAKVARDQAVKKWQFVEKLQDLDTDYGSGYPNDPKTKAWLKEHVEPVFGFPQFVRFSWRTAQTILEKEAEDVIWEDSASENQEGLRKITSYFLNEGSQARPRSSHRYFLERGLESATSL

SEQ ID NO: 133 - DNA, 691 bp, Homo sapiens
  misc_feature: Incyte ID No: 229176.4
  unsure 554, 589, 618, 625, 630, 632, 642, 647, 654, 667, 679, 683: a, t, c, g, or other
actggtgtgtagttcttaaagagcagttatcactgttccctgccttgtggtgtcatcggatgtgtccccctcgctccaactgagctgtacagcgagtgacccaggctgggactgacccctgctgagaagtaccaggcggtcttgtccctctgcctgaagcccagacagtgctctcaagcataactgatgtctcgctcatcagatcctcctggccaacttcttggcccagacagaggccctgatgaggggaaaatcgacggaggaggcccgaaaggagctccaggctgcgggcaagagtccagaggaccttgagaggctgctgccacataaggtcagcacttctgcatttggctttggggtgcatgctggagttggaggtgtgaagctatggcaccaggcaggggcttggggcgtgcctggcttgtcctacagaatgggagggcctgtcctcacagacctgcacgtctcagcctctggggcagggtgtgcttcccttcaaggggtttagggatcaggactctcttggagacattccttggtgttttctgcaggtntttgaaggaaatcgcccaaccaactctattgtgtncaccaagctcacaccattcatgcttgganccttggncggtnantgagtagggnaaacntcctggnttggggtaggttnaaatgggcttgngganccctgatg

SEQ ID NO: 134 - DNA, 3616 bp, Homo sapiens
  misc_feature: Incyte ID No: 229176.5
aggatctggccgtggtatgaggatcgagtctgtcagtgtctgaggaggtggatctggatctgtcagtatctgaggaggtaggatctggccttggtttgaggaactgggtcgttcaatatctgaggaggtacgaatctgatacaggtatgaagatctggttctctccatgtctggaggtaggatctggtacaagtgtgaggatctgggtctgtttatatctgaggaggtaggatctgtacaggtgtgaggatctgggtctctctgtttctgagcaggtaggatctggtacaagtgtaaggatctgggtctgtccatgtctgaggaggtaggatctggagcaggtataaggatctgggtctttcaatgtctgagaaggtaggatctggccatggtatgaggatctgagtctttcaatatctgaggagataggaatatagtacaggtgtgaggatctgggtctctccatgttggaagaggtaggaatctcttacagacatgaagatctgcgtctgtcaatgtgtgaagaggtaagacctggccctggtatgaagatctgtgtctccccatgtctgagaaggtaggatctggatctgcctgtgtctgaggaggtaggatctggcatgagtatgaggatctgcgtctgttcatgtctgaggaggttggatctggcccccttatgaggatctgagtctgtcaatatctgaagaggtaggaatctggtacaggtatgaggatctgtgtgtgtgtcagtgtctgaggaattaggaatctggtacaggtgtgaggatcttcatgtctctgtatctgaggaggtaggatctgatacaggtattaggatctgggtctatgtctgaggaggtagcatctgatacaggtatgaagacctgggtctgaccatgtctgaagtggttggatctggccctggtatgaggatctgggtttgtcagtatttgaggaggtaggatctgtccctggtaggagggtctgtgtcttctagtgtctgaaaaagtaggatctggccctggtatgaggatctgggtctgtcagtatctgaggaggtaggatctcatacaggtatgaggatctgggtttttcaatgtctgaggaggtaggatctggcacaggcatgagcatctgggtctgaccatgtctaaagagttgaagctgtgtgcaggtatgaggccttgggtctgccagtgtctggggaggtgaggctgggcatgggtgtgagaccctgggtctgtccatatctgaggaggtaggatctggtatgagtatgaggatctgggtgtgtccgtgtctgaggaggtgggccctggcacaggtatgaggcctggggtctgtccgtgtctgaggaggtgggccctggcgcaggtatgaggccctgggtgtgtccgtgtctgaggaggtgggccctggcacaggtatgaggtcctgggtctgctggtgtctgcagagacagggcccgacatctcagggaagaccacggtaagctcttcagtttgtcttgtggctgtggtcagtcatctgtagtctgccctgttggtcttcccatgtgttgccagcacctgcctgctgccttgcttcctggaggtgggttgggccagggccctccgagacgcccctgtgcaagaccagggacagggtttccggcaggaggtggggggcggggtgtgccggccctccctcagcaccttgtcctgtctctcctagtgggtgggaggacgctactcgctgtggtcggccatcggactctccattgccctgcacgtgggttttgacaacttcgagcagctgctctcgggggctcactggatggaccagcacttccgcacgacgcccctggagaagaacgcccccgtcttgctggccctgctgggtatctggtacatcaactgctttgggtgtgagacacacgccatgctgccctatgaccagtacctgcaccgctttgctgcgtacttccagcagggcgacatggagtccaatgggaaatacatcaccaaatctggaacccgtgtggaccaccagacaggccccattgtgtggggggagccagggaccaatggccagcatgctttttaccagctcatccaccaaggcaccaagatgataccctgtgacttcctcatcccggtccagacccagcaccccatacggaagggtctgcatcacaagatcctcctggccaacttcttggcccagacagaggccctgatgaggggaaaatcgacggaggaggcccgaaaggagctccaggctgcgggcaagagtccagaggaccttgagaggctgctgccacataaggtctttgaaggaaatcgcccaaccaactctattgtgttcaccaagctcacaccattcatgcttggagccttggtcgccatgtatgagcacaagatcttcgttcagggcatcatctgggacatcaacagctttgaccagtggggagtggagctgggaaagcagctggctaagaaaatagagcctgagcttgatggcagtgctcaagtgacctctcacgacgcttctaccaatgggctcatcaacttcatcaagcagcagcgcgaggccagagtccaataaactcgtgctcatctgcagcctcctctgtgactcccctttctcttctcgtccctcctccccggagccggcactgcatgttcctggacaccacccagagcaccctctggttgtgggcttggaccacgagcccttagcagggaaggctggtctcccccagcctaacccccagcccctccatgtctatgctccctctgtgttagaattggctgaagtgtttttgtgcagctgacttttctgacccatgttcacgttgttcacatcccatgtagaaaaataaagatgccacggaggaggttgtaggctcagcctctgatttttttttttcctgtgatggtgctttatgtagcagagggcaggagcgctcagcaggacgcaggctgtgcctctgcggacacttaacactaagtggtgagcgggtctagagtggagcaaggtgccctgagaagacaatagtggggtgggggcacaatcagtcaggacggcaacttggcctgtgtcaccaaatcccaagactgttttccactcctcacctctgtgactggagaaattggatactctgttcactcgatggttctaaaaactgcattgagattatgtttgtttcgggtgaattcctggacaagaccgaggatgactgccatctcctggcaagacgctcaggtagttcttttgctttaaaaggcagagcgagactccatcccccaccgccccgcaaaaaaaaaggaaaagagaaagatttattttttgaacctctggtttgtgccaggtaccatattaggccctaaagataccagagggaacaaaacagacctcatgaaactgatgttttagtgggggcagacaaatagtaaataagtaaacatccatgagatccattatgatgagtgttatgagaagaataaagactggaaggaaaatgggagaatgttggggagggttagtttgggataaggaaggtgaggacagggcaggccccaactgacaaggaaacgtttgaataaagagcctaaggaggcaaggcggggagccg

SEQ ID NO: 135 - DNA, 1272 bp, Homo sapiens
  misc_feature: Incyte ID No: 002940CB1
cggcgtggcagattcagttgtttgcgggcggccgggagagtagcagtgccttggaccccagctctcctccccctttctctctaaggatggcccagaaggagaactcctacccctggccctacggccgacagacggctccatctggcctgagcaccctgccccagcgagtcctccggaaagagcctgtcaccccatctgcacttgtcctcatgagccgctccaatgtccagcccacagctgcccctggccagaaggtgatggagaatagcagtgggacacccgacatcttaacgcggcacttcacaattgatgactttgagattgggcgtcctctgggcaaaggcaagtttggaaacgtgtacttggctcgggagaagaaaagccatttcatcgtggcgctcaaggtcctcttcaagtcccagatagagaaggagggcgtggagcatcagctgcgcagagagatcgaaatccaggcccacctgcaccatcccaacatcctgcgtctctacaactatttttatgaccggaggaggatctacttgattctagagtatgccccccgcggggagctctacaaggagctgcagaagagctgcacatttgacgagcagcgaacagccacggtccgggcgatcatggaggagttggcagatgctctaatgtactgccatgggaagaaggtgattcacagagacataaagccagaaaatctgctcttagggctcaagggagagctgaagattgctgacttcggctggtctgtgcatgcgccctccctgaggaggaagacaatgtgtggcaccctggactacctgcccccagagatgattgaggggcgcatgcacaatgagaaggtggatctgtggtgcattggagtgctttgctatgagctgctggtggggaacccaccctttgagagtgcatcacacaacgagacctatcgccgcatcgtcaaggtggacctaaagttccccgcttccgtgcccacgggagcccaggacctcatctccaaactgctcaggcataacccctcggaacggctgcccctggcccaggtctcagcccacccttgggtccgggccaactctcggagggtgctgcctccctctgcccttcaatctgtcgcctgatggtccctgtcattcactcgggtgcgtgtgtttgtatgtctgtgtatgtataggggaaagaagggatccctaactgttcccttatctgttttctacctcctcctttgtttaataaaggctgaagctttttgtaaaaaaaaaa

SEQ ID NO: 136 - protein, 347 aa, Homo sapiens
  misc_feature: Incyte ID No: 002940CD1
MAQKENSYPWPYGRQTAPSGLSTLPQRVLRKEPVTPSALVLMSRSNVQPTAAPGQKVMENSSGTPDILTRHFTIDDFEIGRPLGKGKFGNVYLAREKKSHFIVALKVLFKSQIEKEGVEHQLRREIEIQAHLHHPNILRLYNYFYDRRRIYLILEYAPRGELYKELQKSCTFDEQRTATVRAIMEELADALMYCHGKKVIHRDIKPENLLLGLKGELKIADFGWSVHAPSLRRKTMCGTLDYLPPEMIEGRMHNEKVDLWCIGVLCYELLVGNPPFESASHNETYRRIVKVDLKFPASVPTGAQDLISKLLRHNPSERLPLAQVSAHPWVRANSRRVLPPSALQSVA

SEQ ID NO: 137 - DNA, 4297 bp, Homo sapiens
  misc_feature: Incyte ID No: 1149046.1
ggcggcggactcggcttgttgtgttgctgcctgagtgccggagacggtcctgctgctgccgcagtcctgccagctgtccgacgatgtcgtcccacctagtcgagccgccgccgcccctgcacaacaacaacaacaactgcgaggaaaatgagcagtctctgcccccgccggccggcctcaacagttcctgggtggagctacccatgaacagcagcaatggcaatgataatggcaatgggaaaaatggggggctggaacacgtaccatcctcatcctccatccacaatggagacatggagaagattcttttggatgcacaacatgaatcaggacagagtagttccagaggcagttctcactgtgacagcccttcgccacaagaagatgggcagatcatgtttgatgtggaaatgcacaccagcagggaccatagctctcagtcagaagaagaagttgtagaaggagagaaggaagtcgaggctttgaagaaaagtgcggactgggtatcagactggtccagtagacccgaaaacattccacccaaggagttccacttcagacaccctaaacgttctgtgtctttaagcatgaggaaaagtggagccatgaagaaagggggtattttctccgcagaatttctgaaggtgttcattccatctctcttcctttctcatgttttggctttggggctaggcatctatattggaaagcgactgagcacaccctctgccagcacctactgagggaaaggaaaagcccctggaaatgcgtgtgacctgtgaagtggtgtattgtcacagtagcttatttgaacttgagaccattgtaagcatgacccaacctaccaccctgtttttacatatccaattccagtaactctcaaattcaatattttattcaaactctgttgaggcattttactaaccttataccctttttggcctgaagacattttagaatttcctaacagagtttactgttgtttagaaatttgcaagggcttcttttccgcaaatgccaccagcagattataattttgtcagcaatgctattatctctaattagtgccaccagactagacctgtatcattcatggtataaattttactcttgcaacataactaccatctctctcttaaaacgagatcaggttagcaaatgatgtaaaagaagctttattgtctagttgttttttttcccccaagacaaaggcaagtttccctaagtttgagttgatagttattaaaaagaaaacaaaacaaaaaaaaaaggcaaggcacaacaaaaaaatatcctgggcaataaaaaaaatattttaaaccagctttggagccacttttttgtctaagcctcctaatagcgtcttttaatttataggaggcaaactgtataaatgataggtatgaaatagaataagaagtaaaatacatcagcagattttcatactagtatgttgtaatgctgtcttttctatggtgtagaatctttctttctgataaggaacgtctcaggcttagaaatatatgaaattgctttttgagatttttgcgtgtgtgtttgatattttttacgataattagctgcatgtgaatttttcatgaccttctttacattttttattttttatttctttatttttttttctctaagaagaggctttggaatgagttccaatttgtgatgttaatacaggcttcttgttttaggaagcatcacctatactctgaagcctttaaactctgaagagaattgtttcagagttattccaagcacttgtgcaacttggaaaaacagacttgggttgtgggaacagttgacagcgttctgaaaagatgccatttgtttccttctgatctctcactgaataatgtttactgtacagtcttcccaaggtgattcctgcgactgcaggcactggtcattttctcatgtagctgtcttttcagttatggtaaactcttaaagttcagaacactcaacagattccttcagtgatatacttgttcgttcatttctaaaatgtgaagctttaggaccaaattgttagaaagcatcaggatgaccagttatctcgagtagattttcttggatttcagaacatctagcatgactctgaaggataccacatgttttatatataaataattactgtttatgatatagacattgatattgactatttagagaaccgttgttaattttaaaactagcaatctataaagtgcaccaggtcaacttgaataaaaacactatgacagacaggtttgccagtttgcagaaactaactcttttctcacatcaacatttgtaaaattgatgtgttatagtggaaaataacatatagattaaacaaaatttttatcttttttcaagaatatagctggctatctttaagaaagatgatatatcctagttttgaaagtaattttcttttttctttctagcatttgatgtctaaataattttggacatctttttcctagaccatgtttctgtcttactcttaaacctggtaacacttgatttgccttctataacctatttatttcaagtgttcatatttgaatttctttgggaagaaagtaaatctgatggctcactgatttttgaaaagcctgaataaaattggaaagactggaaagttaggagaactgactagctaaactgctacagtatgcaatttctattacaattggtattacaggggggaaaagtaaaattacactttacctgaaagtgacttcttacagctagtgcattgtgctctttccaagttcagcagcagttctatcagtggtgccactgaaactgggtatatttatgatttctttcagcgttaaaaagaaacatagtgttgccctttttcttaaagcatcagtgaaattatggaaaattacttaaaacgtgaatacatcatcacagtagaatttattatgagagcatgtagtatgtatctgtagccctaacacatgggatgaacgttttactgctacacccagatttgtgttgaacgaaaacattgtggtttggaaaggagaattcaacaattaatagttgaaattgtgaggttaatgtttaaaaagctttacacctgtttacaatttggggacaaaaaggcaggcttcatttttcatatgtttgatgaaaactggctcaagatgtttgtaaatagaatcaagagcaaaactgcacaaacttgcacattggaaagtgcaacaagttcccgtgattgcagtaaaaatatttactattctaaaaaaatgagaattgaagacttagccagtcagataagttttttcatgaacccgttgtggaaattattggaattaactgagccaaagtgattatgcattcttcatctattttagttagcactttgtatcgttatatacagtttacaatacatgtataacttgtagctataaacattttgtgccattaaagctctcacaaaacttttcctgtcagtatatcatttttctgtcgcacctgttgcctgggagtttcaggcgatgaggcctcctcgcctacacacagccttccagtcatctggcttccccagcagtggagttcctaacagtgctcagggtgtgaacggtgttctgtggggacagtcaccgcagtgtgagcattcgtgagtgcctcgggactgtggcattcagagcatttgcctccaggtagtggcaggagggcgctcacgggaggagtgctcaggaagtacaggagagaagaagagtgtgccctgatggaaatgacagtgggacaccagtgaaagtggatccagaaggaactggaagttccacgtgcctggaaaacaggatggatacagaggaaactgaaaaatgtaggttagtactgaacctaattgaaatgtgtgtgccctcccaggggtcacacttcatcatatagttagctgggtttacttcttttaaaccaggaggtgatttaagatgtaaattttagacagtcaagccatctggtgagagagtaccagaggagatcaatcagttctctaggcgaggagctagggcctgtcctgggctgtcaccctgaggttggcagtggtgggccaggatacgtatgagaaacaaagcggaagtaaactggtcagaaagtgacttagagacgaaggcgtgtgtattcctttgtgtgtgtggcccgtaaaacatgggttgatcccattagttaaaggaggacaggagaagaaatggggtggtaggagcaaagagggaggatttcagttttgagtgcgttgaacatgaaatgtctgagggccttctgattggacacttactcc

SEQ ID NO: 138 - DNA, 1843 bp, Homo sapiens
  misc_feature: Incyte ID No: 1750567CB1
ggaaggcagcgagcaggatcccctactctgcgggcggcgcgaggcgtctggctcttcgcggcggcggcgaggggaaagggagcgcgggggctgggtggaatcgaggagtgaggaaaaagggaaggggcgggggagagggaccagggaaggcgtcggggggaatctcgcgagggttggagttttggcgagagtttgtggaagatggcgcctgttgtgacagggaaatttggtgagcggcctccacctaaacgacttactagggaagctatgcgaaattatttaaaagagcgaggggatcaaacagtacttattcttcatgcaaaagttgcacagaagtcatatggaaatgaaaaaaggtttttttgcccacctccttgtgtatatcttatgggcagcggatggaagaaaaaaaaagaacaaatggaacgcgatggttgttctgaacaagagtctcaaccgtgtgcatttattgggataggaaatagtgaccaagaaatgcagcagctaaacttggaaggaaagaactattgcacagccaaaacattgtatatatctgactcagacaagcgaaagcacttcatgttgtctgtaaagatgttctatggcaacagtgatgacattggtgtgttcctcagcaagcggataaaagtcatctccaaaccttccaaaaagaagcagtcattgaaaaatgctgacttatgcattgcctcaggaacaaaggtggctctgtttaatcgactacgatcccagacagttagtaccagatacttgcatgtagaaggaggtaattttcatgccagttcacagcagtggggagccttttttattcatctcttggatgatgatgaatcagaaggagaagaattcacagtccgagatggctacatccattatggacaaacagtcaaacttgtgtgctcagttactggcatggcactcccaagattgataattaggaaagttgataagcagaccgcattattggatgcagatgatcctgtgtcacaactccataaatgtgcattttaccttaaggatacagaaagaatgtatttgtgcctttctcaagaaagaataattcaatttcaggccactccatgtccaaaagaaccaaataaagagatgataaatgatggcgcttcctggacaatcattagcacagataaggcagagtatacattttatgagggaatgggccctgtccttgccccagtcactcctgtgcctgtggtagagagccttcagttgaatggcggtggggacgtagcaatgcttgaacttacaggacagaatttcactccaaatttacgagtgtggtttggggatgtagaagctgaaactatgtacaggtgtggagagagtatgctctgtgtcgtcccagacatttctgcattccgagaaggttggagatgggtccggcaaccagtccaggttccagtaactttggtccgaaatgatggaatcatttattccaccagccttacctttacctacacaccagaaccagggccgcggccacattgcagtgcagcaggagcaatccttcgagccaattcaagccaggtgccccctaacgaatcaaacacaaacagcgagggaagttacacaaacgccagcacaaattcaaccagtgtcacatcatctacagccacagtggtatcctaactaccgtctttttgctaggacttaaactgacttgagtgtggcaaaaagttaacaaaaaaggagaaaaaatgaacaatcgtttgtggtttcttgggaaaacttttcataccaggtgatactattcaaaaaccccgttgtctccctgcaagtgctgatttgaaatgcagaacctataata

SEQ ID NO: 139 - protein, 487 aa, Homo sapiens
  misc_feature: Incyte ID No: 1750567CD1
MAPVVTGKFGERPPPKRLTREAMRNYLKERGDQTVLILHAKVAQKSYGNEKRFFCPPPCVYLMGSGWKKKKEQMERDGCSEQESQPCAFIGIGNSDQEMQQLNLEGKNYCTAKTLYISDSDKRKHFMLSVKMFYGNSDDIGVFLSKRIKVISKPSKKKQSLKNADLCIASGTKVALFNRLRSQTVSTRYLHVEGGNFHASSQQWGAFFIHLLDDDESEGEEFTVRDGYIHYGQTVKLVCSVTGMALPRLIIRKVDKQTALLDADDPVSQLHKCAFYLKDTERMYLCLSQERIIQFQATPCPKEPNKEMINDGASWTIISTDKAEYTFYEGMGPVLAPVTPVPVVESLQLNGGGDVAMLELTGQNFTPNLRVWFGDVEAETMYRCGESMLCVVPDISAFREGWRWVRQPVQVPVTLVRNDGIIYSTSLTFTYTPEPGPRPHCSAAGAILRANSSQVPPNESNTNSEGSYTNASTNSTSVTSSTATVVS

SEQ ID NO: 140 - DNA, 732 bp, Homo sapiens
  misc_feature: Incyte ID No: 1824950CB1
tcaggctctcaccctcctctcctgcagctccagctctgtgctctgcctctgaggagaccatggcccggcctctgtgtaccctgctactcctgatggctaccctggctggggctctggcctcgagctccaaggaggagaataggataatcccaggtggcatctatgatgcagacctcaatgatgagtgggtacagcgtgcccttcacttcgccatcagcgagtacaacaaggccaccgaagatgagtactacagacgcccgctgcaggtgctgcgagccagggagcagacctttgggggggtgaattacttcttcgacgtagaggtgggccgcaccatatgtaccaagtcccagcccaacttggacacctgtgccttccatgaacagccagaactgcagaagaaacagttgtgctctttcgagatctacgaagttccctgggaggacagaatgtccctggtgaattccaggtgtcaagaagcctaggggtctgtgccaggccagtcacaccgaccaccacccattcccacccactgtagtgctcccacccctggactggtggcccccgacgtgcgggaggcctccccatgtgcctgtgccaagagacagacagagaaggctgcaggagtcctttgttgctcagcagggcgctctgccctccctccagccatcttgcttctaatagacctggtacatggtacacacacccccacctcctgcaattaaacagtat

SEQ ID NO: 141 - protein, 141 aa, Homo sapiens
  misc_feature: Incyte ID No: 1824950CD1
MARPLCTLLLLMATLAGALASSSKEENRIIPGGIYDADLNDEWVQRALHFAISEYNKATEDEYYRRPLQVLRAREQTFGGVNYFFDVEVGRTICTKSQPNLDTCAFHEQPELQKKQLCSFEIYEVPWEDRMSLVNSRCQEA

SEQ ID NO: 142 - DNA, 761 bp, Homo sapiens
  misc_feature: Incyte ID No: 481114.7
ggggggtccctgcctcgggctctcaccctcctctcctgcagctccagctttgtgctctgcctctgaggagaccatggcccggcctctgtgtaccctgctactcctgatggctaccctggctggggctctggcctcgagctccaaggaggagaataggataatcccaggtggcatctatgatgcagacctcaatgatgagtgggtacagcgtgcccttcacttcgccatcagcgagtacaacaaggccaccgaagatgagtactacagacgcccgctgcaggtgctgcgagccagggagcagacctttgggggggtgaattacttcttcgacgtagaggtgggccgcaccatatgtaccaagtcccagcccaacttggacacctgtgccttccatgaacagccagaactgcagaagaaacagttgtgctctttcgagatctacgaagttccctgggaggacagaatgtccctggtgaattccaggtgtcaagaagcctaggggtctgtgccaggccagtcacaccgaccaccacccactcccacccactgtagtgctcccacccctggactggtggcccccaccctgcgggaggcctccccatgtgcctgtgccaagagacagacagagaaggctgcaggagtcctttgttgctcagcagggcgctctgccctccctccttccttcttgcttctaatagacctggtacatggtacacacacccccacctcctgcaattaaacagtagcatcgccaaaaaaaa

SEQ ID NO: 143 - DNA, 4273 bp, Homo sapiens
  misc_feature: Incyte ID No: 1383937.1
  unsure 1545, 1608, 1611, 1615, 1619: a, t, c, g, or other
ctgtagtgactgccacactttgcaaggacaccgtagagggggcatgtccgcgctccaacttcctcccgacgcagcctctgattggctcctgggcttataagaaacgcgtgaatgagcagctgccgcgggcagaaagttgccggaggtctccgggtggtatcgccctttcctctttgccagcccgctggcgagccgagccggggcaagatgaggtcgtcctgtgtcctgctcaccgccctggtggcgctggccgcctattacgtctacatcccgctgcctggctccgtgtccgacccctggaagctgatgctgctggacgccactttccggggtgcacagcaagtgagtaacctgatccactacctgggactgagccatcacctgctggcactgaattttatcattgtttcttttggcaaaaaaagcgcgtggtcttctgcccaagtgaaggtgaccgacacagactttgatggtgtggaagtcagagtgtttgaaggccctccgaagcccgaagagccactgaaacgcagcgtcgtttatatccacggaggaggctgggccttggcaagtgcaaaaatcaggtattatgatgagctgtgtacagcaatggctgaggaattgaatgctgtcattgtttccattgaatacaggctagttccaaaggtttattttcctgagcaaattcatgatgttgtacgggccacaaagtatttcctgaagccagaagtcttacagaagtatatggttgatccaggcagaatttgcatttctggtgacagtgctggtggaaatctggctgctgcccttggacaacagtttactcaagatgccagcctaaaaaaataagctcaaactacaagctttaatttatccagttcttcaagctttagattttaacacaccatcttatcagcaaaatgtgaacaccccaatcctgccccgctatgtcatggtgaagtattgggtggactacttcaaaggcaactatgactttgtgcaggcaatgatcgttaacaatcacacttcacttgatgtggaagaggctgctgctgtcagggcccgtctaaactggacatccctcttgcctgcatccttcacaaagaactacaagcctgttgtacagaccacaggcaatgccaggattgtccaggagcttcctcagttgctggatgcccgctccgccccactcattgcagaccaggcagtgctgcagctcctcccaaagacctacattctgacgtgtgagcatgatgtcctcagagacgatggcatcatgtatgccaagcgtttggagagtgccggtgtggaggtgaccctggatcactttgaggatggctttcacggatgtatgattttcactagctggcccaccaacttctcagtgggaatccggactaggaatagttacatcaagtggctagatcaaaacctgtaaaggagcaaaacttccagaagcctcgagcccctcttgacctcctacacctgctttggaaagacatgcactttttagttgactaattcttcctcccattcccctctacttgngagttatggaatttctagtccataactgaagtctttatgataacgggtttttaaaaatgaatntgnctancttnagttcaaaacatgtaaatttggttcccagagtgggccaatctctctggtcttggtatcttagccaactatactgatacctacagctacagaaagcaggactaggaactggaaataactttgggtcctgccttcattaggacgttctttttagaagcagttcttccagctctggatcatagagtgacctttaataagttaaaaaaacgaggactccttaattctgctagagttaaccttgagttcagagcagtattaaatgcgtgcactttcaggtcagtactggggaccaagtaccctctggtcttttgtgaatggatggttttgtttcctatgggaattttggcaaaggttttctggaaagaacaagtttctcaaaggactttcttcctctagaatgttcattttatgagatcgctatctgtaagtccagttggattacaggaatacttgaaagttactttctaccactattagaaaatatgaagtcgcatgcactggatatctatatatcattaggtttttgttgtgtttttggttatgctgtcccccttctccttggggagatatttgggagcaaacttatttagatttagagtaaacttttcattatagagcaagtaaaaacagacaaatgaaacaacctagtgtttcacataaaaatacttctgacataaagtaccaagagcagtgtgaatatacttggcatagtcaaaaaagaaaatacatttaatattagttcaaaattgttaaaaatacctttagaaggtctagtctattattgaaaactcaattttttcacttatatggctttaaaatggagctattttgctacaatataatgtattgtttatttttttaagttatttaatgttaatatacatagctagacttaaggtttttcagaaagatgtccataataaatattaaaaacaatggtattttttaaaaaactgccttagggttttaaaaccttccctacagttataaccacgtgtaattttgtggaaatgatataacagctattaatactactataacataggcataaatattttcgtgtttatatgcatatacaagttaaaataattagaaactatgactgcgcctagtaaagtcatctaggtttatagttcagtagcttaggcaaggcacacactgctcatctccgctttttagggtcagaggaacacaagctcatgttctgagtgaagggcgtacactggcacctggtgttgcctagatcccccatctcctccttccagccaggtctggaagtttcaacagcccaagcttaacttcatgtaaagtcttcactgccagtgggaacatctttgacacaacaagacactccaattgtgatttgagttgaggatctctgcctgccttcctgccgtccttccttcttccccgatccatgctacttttaggggctgcggagagcagcagcagagctgagtaatgatacagggcaccacggagagaaagtagaaccatttcactcctgggaagatggggtatttcccacttccagcaacgaaataacaaatgaaaagttgcatacttattgatgtattgtatgagccagtagcattttatgtacaaaacagaagtcaatgcaacagtatgtatgtgtgcctgtgtgtgtataaaaataaccattgaagctaacttgctaatgtacttaggcaagccacttcccatctctgggcctcgtctttcctccctctaaaatcaaagagctgaattatgtgatccttgaggtctcttccacttataataccaactgtcttgtcagactggcaaattatattggcctctccttatgtggtggtttttttggtaggtcatagttccttatacacagacacctgcatcatcgaaggtctttttttcctaaaaaaaaaaaatgggattttagttcttattctgtgataactatcctcctcatataatactattctttttgacaccatttgaaggaaccaatatttggaccttattttgaggttgtctgtctcgaagaaaaagaaaataaaatgtataggcagggttccttcaattggcattttccccagaattgtgagccaaagcctatagtaattgcagacagcaaatgattccggatctctaaaaggctctctcagatgaaaagggagtaaaggaaaaaagaggtcaaccactgtttctgataatgtacttgagtttcattgttcttttagtttgtattcttataaaaaatgtttacactctgcagattgattttttttttttagtactgtggctttcttttcctattttatgaaaaaaatgataatctttttgtaaaattgtctgtgaaatataaacattaatatataaagaaaaaccttgaagtgctgtatagtgaagtataaattaatgttttattgatttgtgaagaatttaagactattatataattatcttggtggatctattttatgcatgaccttttaacctttgactttgcttatttcccactacgaaggggaaggtagattttatgaatgattttaatagcaaatatattttataaagtgaaaatccagtgtggaggtagcaaagcatctatctattctgaatcatgtttggaaataaaattgctccatctgggaatgtaaaaaaaaaaaaaagg

SEQ ID NO: 144 - DNA, 2641 bp, Homo sapiens
  misc_feature: Incyte ID No: 1001470CB1
  unsure 2635: a, t, c, g, or other
ctgagcatcctcccgccacacagaaacccgcccagccggggccaccgaccccaccccctgcctggaaacttaaaggaggccggagctgtggggagctcagagctgagatcctacaggagtccagggctggagagaaaacctctgcgaggaaagggaaggagcaagccgtgaatttaagggacgctgtgaagcaatcatggatgcaatgaagagagggctctgctgtgtgctgctgctgtgtggagcagtcttcgtttcgcccagccaggaaatccatgcccgattcagaagaggagccagatcttaccaagtgatctgcagagatgaaaaaacgcagatgatataccagcaacatcagtcatggctgcgccctgtgctcagaagcaaccgggtggaatattgctggtgcaacagtggcagggcacagtgccactcagtgcctgtcaaaagttgcagcgagccaaggtgtttcaacgggggcacctgccagcaggccctgtacttctcagatttcgtgtgccagtgccccgaaggatttgctgggaagtgctgtgaaatagataccagggccacgtgctacgaggaccagggcatcagctacaggggcacgtggagcacagcggagagtggcgccgagtgcaccaactggaacagcagcgcgttggcccagaagccctacagcgggcggaggccagatgccatcaggctgggcctggggaaccacaactactgcagaaacccagatcgagactcaaagccctggtgctacgtctttaaggcggggaagtacagctcagagttctgcagcacccctgcctgctctgagggaaacagtgactgctactttgggaatgggtcagcctaccgtggcacgcacagcctcaccgagtcgggtgcctcctgcctccggtggaattccatgatcctgataggcaaggtttacacagcacagaaccccagtgcccaggcactgggcctgggcaaacataattactgccggaatcctgatggggatgccaagccctggtgccacgtgctgaagaaccgcaggctgacgtgggagtactgtgatgtgccctcctgctccacctgcggcctgagacagtacagccagcctcagtttcgcatcaaaggagggctcttcgccgacatcgcctcccacccctggcaggctgccatctttgccaagcacaggaggtcgcccggagagcggttcctgtgcgggggcatactcatcagctcctgctggattctctctgccgcccactgcttccaggagaggtttccgccccaccacctgacggtgatcttgggcagaacataccgggtggtccctggcgaggaggagcagaaatttgaagtcgaaaaatacattgtccataaggaattcgatgatgacacttacgacaatgacattgcgctgctgcagctgaaatcggattcgtcccgctgtgcccaggagagcagcgtggtccgcactgtgtgccttcccccggcggacctgcagctgccggactggacggagtgtgagctctccggctacggcaagcatgaggccttgtctcctttctattcggagcggctgaaggaggctcatgtcagactgtacccatccagccgctgcacatcacaacatttacttaacagaacagtcaccgacaacatgctgtgtgctggagacactcggagcggcgggccccaggcaaacttgcacgacgcctgccagggcgattcgggaggccccctggtgtgtctgaacgatggccgcatgactttggtgggcatcatcagctggggcctgggctgtggacagaaggatgtcccgggtgtgtacaccaaggttaccaactacctagactggattcgtgacaacatgcgaccgtgaccaggaacacccgactcctcaaaagcaaatgagatcccgcctcttcttcttcagaagacactgcaaaggcgcagtgcttctctacagacttctccagacccaccacaccgcagaagcgggacgagaccctacaggagagggaagagtgcattttcccagatacttcccattttggaagttttcaggacttggtctgatttcaggatactctgtcagatgggaagacatgaatgcacactagcctctccaggaatgcctcctccctgggcagaaagtggccatgccaccctgttttcagctaaagcccaacctcctgacctgtcaccgtgagcagctttggaaacaggaccacaaaaatgaaagcatgtctcaatagtaaaagataacaagatctttcaggaaagacggattgcattagaaatagacagtatatttatagtcacaagagcccagcagggcctcaaagttggggcaggctggctggcccgtcatgttcctcaaaagcacccttgacgtcaagtctccttcccctttccccactccctggctctcagaaggtattccttttgtgtacagtgtgtaaagtgtaaatcctttttctttataaactttagagtagcatgagagaattgtatcatttgaacaactaggcttcagcatatttatagcaatccatgttagtttttactttctgttgccacaaccctgttttatactgtacttaataaattcagatatatttttcacagnttttcc

SEQ ID NO: 145 - protein, 562 aa, Homo sapiens
  misc_feature: Incyte ID No: 1001470CD1
MDAMKRGLCCVLLLCGAVFVSPSQEIHARFRRGARSYQVICRDEKTQMIYQQHQSWLRPVLRSNRVEYCWCNSGRAQCHSVPVKSCSEPRCFNGGTCQQALYFSDFVCQCPEGFAGKCCEIDTRATCYEDQGISYRGTWSTAESGAECTNWNSSALAQKPYSGRRPDAIRLGLGNHNYCRNPDRDSKPWCYVFKAGKYSSEFCSTPACSEGNSDCYFGNGSAYRGTHSLTESGASCLRWNSMILIGKVYTAQNPSAQALGLGKHNYCRNPDGDAKPWCHVLKNRRLTWEYCDVPSCSTCGLRQYSQPQFRIKGGLFADIASHPWQAAIFAKHRRSPGERFLCGGILISSCWILSAAHCFQERFPPHHLTVILGRTYRVVPGEEEQKFEVEKYIVHKEFDDDTYDNDIALLQLKSDSSRCAQESSVVRTVCLPPADLQLPDWTECELSGYGKHEALSPFYSERLKEAHVRLYPSSRCTSQHLLNRTVTDNMLCAGDTRSGGPQANLHDACQGDSGGPLVCLNDGRMTLVGIISWGLGCGQKDVPGVYTKVTNYLDWIRDNMRP

SEQ ID NO: 146 - DNA, 1737 bp, Homo sapiens
  misc_feature: Incyte ID No: 2666766CB1
cacatcttccagcacctgcgcgcctgaatccgtcccacccaggcccagacgcaggcttcttctcctcgggtcttggtcctgcatcctctctctcccagagcctccgttagggggtgggaaaggactttgccataggtcgctgaggccaccatctgctctcttactggccaagggcgtaaaaagatagtcctcccattagctagagagcaaaccccagaaagcctattggctgcgccgtccgcgggccttggtccgctttgaaggcgggctgcggctgcgagaggagggcgggcgggaggctagctgttgtcgtggttgctcggaggcacgtgtgcagtcccggaagcggcgaggggaaactgctccgcgcgcgccgcggggaggaggaaccgcccggttcctttagggtccgggcccggccgggccatggattcaatgcctgagcccgcgtcccgctgtcttctgcttcttcccttgctgctgctgctgctgctgctgctgccggccccggagctgggcccgagccaggccggagctgaggagaacgactgggttcgcctgcccagcaaatgcgaagtgtgtaaatatgttgctgtggagctgaagtcagcctttgaggaaaccggcaagaccaaggaggtgattggcacgggctatggcatcctggaccagaaggcctctggagtcaaatacaccaagtcggacttgcggttaatcgaagtcactgagaccatttgcaagaggctcctggattatagcctgcacaaggagaggaccggcagcaatcgatttgccaagggcatgtcagagacctttgagacattacacaacctggtacacaaaggggtcaaggtggtgatggacatcccctatgagctgtggaacgagacttctgcagaggtggctgacctcaagaagcagtgtgatgtgctggtggaagagtttgaggaggtgatcgaggactggtacaggaaccaccaggaggaagacctgactgaattcctctgcgccaaccacgtgctgaagggaaaagacaccagttgcctggcagagcagtggtccggcaagaagggagaccacagctgccctgggagggaagaagtccaagaagaagagcagcagggccaaggcagcaggcggcaggagtagcagcagcaaacaaaggaaggagctgggtggccttgaggggagaccccagccccgaggaggatgagggcatccagaaggcatcccctctcacacacagcccccctgatgagctctgagcccacccagcatcctctgtcctgagacccctgattttgaagctgaggagtcaggggcatggctctggcaggccgggatggccccgcagccttcagcccctccttgccttggctgtgccctcttctgccaaggaaagacacaagccccaggaagaactcagagccgtcatgggtagcccacgccgtcctttcccctccccaagtgtttctctcctgacccagggttcaggcaggccttgtggtttcaggactgcaaggactccagtgtgaactcaggaggggcaggtgtcagaactgggcaccaggactggagccccctccggagaccaaactcaccatccctcagtcctccccaacagggtactaggactgcagccccctgtagctcctctctgcttacccctcctgtggacaccttgcactctgcctggcccttcccagagcccaaagagtaaaaatgttctggttctga

SEQ ID NO: 147 - protein, 240 aa, Homo sapiens
  misc_feature: Incyte ID No: 2666766CD1
MDSMPEPASRCLLLLPLLLLLLLLLPAPELGPSQAGAEENDWVRLPSKCEVCKYVAVELKSAFEETGKTKEVIGTGYGILDQKASGVKYTKSDLRLIEVTETICKRLLDYSLHKERTGSNRFAKGMSETFETLHNLVHKGVKVVMDIPYELWNETSAEVADLKKQCDVLVEEFEEVIEDWYRNHQEEDLTEFLCANHVLKGKDTSCLAEQWSGKKGDHSCPGREEVQEEEQQGQGSRRQE

SEQ ID NO: 148 - DNA, 1439 bp, Homo sapiens
  misc_feature: Incyte ID No: 1556751CB1
gagtatcccttgtttaatcacttttgtggttaaaagagacctttgggtcagtctgcctcattccttgaagagtttagccctggctcacttttcactctatttcttctcctgtctcaagaaagaagaaaaaaagagacaaattacccagaaacccctcccttccccacatggaggccttggcaaatgttaattttcctagaaaatccttcagacctgaagacgcaggaaaagaatctggctctcagggtggcttctgcgtccccgccgccaggccccagactatggtcacagggccgtcctgttcctccccgggactccagaatttctctcctcaaaggaaagaaaacagggcatgcgcttgttggcaaaacgcagggccggctcccaaaaaccccatgtgtgtacgattaaaagttggccgtccccaggcctcccagcgcaaacttaaagagacagggctttgctgaaaaccaaacatgggccagctgggctttttaacaacctagagactttccggagctgcctggaacagagcctgcgggaaacggggcttgccagagacactcacagtttccttcatggcctgttttggtcccctaagaatctccacatcattgtctttcttgtgccttttccttggtgagcaacagaaagggaagggttccaagcctctaaaaatgtgctttgtgatcaggagtgcgctccaaaccaaatacgcgcgctgccctttcgaggccagtgagctcagcctccaaggctttaaagccacatttcagcaagagaaagcgctgagagctcgcaggttcattaaagaaggcaaagcactggtttctctccttagaaaagtaggtttcttggcttgatgtagactggcttgctttgatttttagtgaagggaatgtacgtaaaacaaaatagggcttggctggtcaaaggagacaagcaggatggatggatggatggatggatggatgtatggatgaatagatagatggtgtttgcatgtaaattgcagagaaaacaaaaccaaagctgattggaaacaattaattgtgggtgtctgagggggaaggtcgcagctttgggcagctttgagaagcggtacaagagttctgtgcctgtgtgtccagccctggagccagccagtgcatttattttaagctcttagaagcaactccttggcccaggaatgcgtgacccctgagatgggtccacgcatctctctacacttccttctctccgtgggatactggactcgtgcctctgcgcccattctcttctcacgcatatccatgagctttaatttcactttctgatcacggtacgtccataaagccagtattacacttaaatgaagtattcttttttgtaatcgttttttttagaaggtaaacaaatttaataaagctaccaataatgagaaaaaaaaaaaaaaaaaa

SEQ ID NO: 149 - protein, 99 aa, Homo sapiens
  misc_feature: Incyte ID No: 1556751CD1
MEALANVNFPRKSFRPEDAGKESGSQGGFCVPAARPQTMVTGPSCSSPGLQNFSPQRKENRACACWQNAGPAPKNPMCVRLKVGRPQASQRKLKETGLC

SEQ ID NO: 150 - DNA, 3093 bp, Homo sapiens
  misc_feature: Incyte ID No: 2716815CB1
gcagagtgctagcaggagcgcgagccagcaagaggcgcctgcgcgatgtccgggcccctgagccgcggcgctgagccagccgggacggacatgcgcgggagggcgccgcggggcagccgccgctcctccgggggaatgaaagctactggttgattttaaagtgcctgggcctcacaggtttggagatgtcccagaataaggcacaatgtcaatagcaggagttgctgctcaggagatcagagtcccattaaaaactggatttctacataatggccgagccatggggaatatgaggaagacctactggagcagtcgcagtgagtttaaaaacaactttttaaatattgacccgataaccatggcctacagtctgaactcttctgctcaggagcgcctaataccacttgggcatgcttccaaatctgctccgatgaatggccactgctttgcagaaaatggtccatctcaaaagtccagcttgccccctcttcttattcccccaagtgaaaacttgggaccacatgaagaggatcaagttgtatgtggttttaagaaactcacagtgaatggggtttgtgcttccacccctccactgacacccataaaaaactccccttcccttttcccctgtgcccctctttgtgaacggggttctaggcctcttccaccgttgccaatctctgaagccctctctctggatgacacagactgtgaggtggaattcctaactagctcagatacagacttccttttagaagactctacactttctgatttcaaatatgatgttcctggcaggcgaagcttccgtgggtgtggacaaatcaactatgcatattttgataccccagctgtttctgcagcagatctcagctatgtgtctgaccaaaatggaggtgtcccagatccaaatcctcctccacctcagacccaccgaagattaagaaggtctcattcgggaccagctggctcctttaacaagccagccataaggatatccaactgttgtatacacagagcttctcctaactccgatgaagacaaacctgaggttccccccagagttcccatacctcctagaccagtaaagccagattatagaagatggtcagcagaagttacttcgagcacctatagtgatgaagacaggcctcccaaagtaccgccaagagaacctttgtcaccgagtaactcgcgcacaccgagtcccaaaagccttccgtcttacctcaatggggtcatgcccccgacacagagctttgcccctgatcccaagtatgtcagcagcaaagcactgcaaagacagaacagcgaaggatctgccagtaaggttccttgcattctgcccattattgaaaatgggaagaaggttagttcaacacattattacctactacctgaacgaccaccatacctggacaaatatgaaaaattttttagggaagcagaagaaacaaatggaggcgcccaaatccagccattacctgctgactgcggtatatcttcagccacagaaaagccagactcaaaaacaaaaatggatctgggtggccacgtgaagcgtaaacatttatcctatgtggtttctccttagaccttggggtcatggttcagcagaggttacataggagcaaatggttctcaattttccagtttgattgaagtgcagagaaaaatcccttagattgcaaaataaaatagttgaactctctgtcttcatgtggaaggtttagagcagttgtgagatgctgttatgctgagaaaccctgactttgttagtgttggaaaaaagtcttacaagtctataatttaaagatgtgatggtggggaggggaggatggggaagctttttatatatgcatacattacatacctatatataaacttgtggtataaccatagaccatagctgcaggttaaccaattagttactatcgtagagtaatatatattcagaataataaactcaagctggagaaatgagtcctgatagactgaaaattgagcaaatggaagaagatacagtattgtttagatcagaatcattaaaaaatatttttgtttagtaagtttgaagatttctggcttttaggccttttctattttgttccatttatttttgcaggcaatcttttccatggagggcagggtatccattctttaccatgggtgtacctgcttaggttaaaaatcataccaaggcctcatacttccaggtttcatgttgcgtcttgttgagggagggagagcaggttacttggcaaccatattgtcacctgtacctgtcacacatcttgaaaaataaaacgataatagaactagtgactaattttcccttacagttcctgcttggtcccacccactgaagtagctcatcgtagtgcgggccgtattagaggcagtggggtacgttagactcagatggaaaagtattctaggtgccagtgttaggatgtcagttttacaaaataatgaagcaattagctatgtgattgagagttattgtttggggatgtgtgttgtggttttgctttttttttttagactgtattaataaacatacaacacaagctggccttgtgttgctggttcctattcagtatttcctggggattgtttgctttttaagtaaaacacttctgacccatagctcagtatgtctgaattccagaggtcacatcagcatctttctgctttgaaaactctcacagctgtggctgcttcacttagatgcagtgagacacatagttggtgttccgattttcacatccttccatgtatttatcttgaagagataagcacagaagagaaggtgctcactaacagaggtacattactgcaatgttctcttaacagttaaacaagctgtttacagtttaaactgctgaatattatttgagctatttaaagcttattatattttagtatgaactaaatgaaggttaaaacatgcttaagaaaaatgcactgatttctgcattatgtgtacagtattggacaaaggattttattcattttgttgcattattttgaatattgtcttttcattttaataaagttataatacttatttatgataaaaaaaaaaaaaaa

SEQ ID NO: 151 - protein, 462 aa, Homo sapiens
  misc_feature: Incyte ID No: 2716815CD1
MSIAGVAAQEIRVPLKTGFLHNGRAMGNMRKTYWSSRSEFKNNFLNIDPITMAYSLNSSAQERLIPLGHASKSAPMNGHCFAENGPSQKSSLPPLLIPPSENLGPHEEDQVVCGFKKLTVNGVCASTPPLTPIKNSPSLFPCAPLCERGSRPLPPLPISEALSLDDTDCEVEFLTSSDTDFLLEDSTLSDFKYDVPGRRSFRGCGQINYAYFDTPAVSAADLSYVSDQNGGVPDPNPPPPQTHRRLRRSHSGPAGSFNKPAIRISNCCIHRASPNSDEDKPEVPPRVPIPPRPVKPDYRRWSAEVTSSTYSDEDRPPKVPPREPLSPSNSRTPSPKSLPSYLNGVMPPTQSFAPDPKYVSSKALQRQNSEGSASKVPCILPIIENGKKVSSTHYYLLPERPPYLDKYEKFFREAEETNGGAQIQPLPADCGISSATEKPDSKTKMDLGGHVKRKHLSYVVSP

SEQ ID NO: 152 - DNA, 3583 bp, Homo sapiens
  misc_feature: Incyte ID No: 347975.11
cggcccgggctgcgcgccagcccgtctccgcggcgggggaccgggctgccttgggcccctcagcgctcgcgtcttttccggcagttggaacgcttcctgttgtcctcacccgtaaccgcctgttgccccctgtctcagagtccctcacgcgtcccctcccgtctttggctcgttggctgccgccgccggggcttcgccagccttcaagtcgagactactggccgaaggggcgtctgcggctctccgccgtccccagccctgcctctccctgggctctgcagccatggcaatgacaggctcaacaccttgctcatccatgagtaaccacacaaaggaaagggtgacaatgaccaaagtgacactggagaatttttatagcaaccttatcgctcaacatgaagaacgagaaatgagacaaaagaagttagaaaaggtgatggaagaagaaggcctaaaagatgaggagaaacgactccggagatcagcacatgctcggaaggaaacagagtttcttcgtttgaagagaacaagacttggattggaagattttgagtccgtaaaagtaataggcagaggagcatttggtgaggtacggcttgttcagaagagagatacgggacatgtgtatgcaatgaaaatactccgtaaagcagatatgcttgaaaaagagcaggttggccacattcgtgcggagcgtgacattctagtggaggcagacagtttgtgggttgtgaaaatgttctatagttttcaggataagctaaacctctacctaatcatggagttcctgcctggaggggacatgatgaccttgttgatgaaaaaagacactctgacagaagaggagactcagttttatatagcagaaacagtattagccatagactctattcaccaacttggattcatccacagagacatcaaaccagacaaccttcttttggacagcaagggccatgtgaaactttctgactttggtctttgcacaggactgaaaaaagcacataggacagaattttataggaatctgaaccacagcctccccagtgatttcactttccagaacatgaattccaaaaggaaagcagaaacctggaaaagaaatagacgtcagctagccttctccacagtaggcactcctgactacattgctcctgaggtgttcatgcagaccgggtacaacaagctctgtgattggtggtcgcttggggtgatcatgtatgagatgctcatcggctacccacctttctgttctgagacccctcaagagacatataagaaggtgatgaactggaaagaaactttgacttttcctccagaagttcccatctctgagaaagccaaggatctaattttgaggttctgctgtgaatgggaacatagaattggagctcctggagttgaggaaataaaaagtaactctttttttgaaggcgttgactgggaacatatcagagagagacctgctgcaatatctattgaaatcaaaagcattgatgatacctcaaacttcgatgagtttccagaatctgatattcttaagccaacagtggccacaagtaatcatcctgagactgactacaagaacaaagactgggtcttcatcaattacacgtacaagcgctttgagggcctgactgcaaggggggcaataccttcctacatgaaagcagcaaaatagtactcttgccacggaatcctatgtggagcagagttctttgtataacatcatgcttttcctctcacactcttgaagagcttccaagaagttgatggaacccaccaatatgtcatagtaaagtctcctgaaatgtggtagtaagaggattttcttccataatgcatctgaaaaactgtaaacaaagacaaccatttctactacgtcggccataaacagctatcctgctttggaagagaagcatcatgagccaatttgataggtgttttaaaaataacttgagttttcctaagttcatcagaatgaaggggaaaaacagccatcatccaacattattgagattgtcgtgtatagtcatcgaatatcagccagttcctgtaattttgtgacacgctctctgccaagcccaccaagtatttcctttatagctaaaagttccatagtactaaggaaataaagcaataaagacagtctcagcagccaggattctggctgaaggaaatgatccgccaccctgagggtggtgatggtagtttctacccatacctcagcctcaggcgagtggcttatagcctccattcatggtgcactttatttatggtactaagataaagactgtcaatccattgatttatctcctcctgtcccccatctaaaatacccatgctgcttttctgagtgttgatgggggttaccagcttgatccactgttgctcttagaaggcccagaaagtctttgggcattgccaagaaatcccggattatgtggaaaaccctcactttctcttcacggctgtaccagaaaatccctaagacagatcttgccgtggactagcaatacctgcaagtgctgccaatgggaactcaatttattcctgggaacctaacgaggagagcccaggcctaggcaggaggcctggaaccctcttggctaaggtgctgttcctgttcctgcaaggtctccagaacccctttggaaatggtgaaggaaccagcccaatagaagtacagagccagctgacaagtccttgtaaagctcactcctcagtccttggcacagccatgttttgtcttctctcttggtatttcttctctcccaactttagccattttgccttggaatcatgattacaattttttcctttgcagatgccttcctgggggatactcctccccaccctaaagggtcgcctgcaacttaggcggattgggtctctctgctgtggcgttctctcttgagagaccctctgaattttagcacaaagtgccttctgtttcacagctgccaccacctttagaggaatttcgtcagaaaaatgtggaggctccatattaatgcattattttttaaaaagttttgataactcttaaagcatcatttgcacctatgtgggaactttgcctgttgcaaagtattgtggccgagctgcagctgggagcctgctttctgccagtcttgaggttctgaagatcagctttgaaaggaaagtatgtcctagcttagccattcagaagagaaaaatggaatatcagagttacagttgtcagtgaaactactttggattttaacctcttagaggaagaaaaaaggttagggaagtgtcaactctggatgaaggtgatgtgtttgcctctcagtctttcattcatagcctgctagtgaaaaggaagtaaatgagattcttttgtgtgactttgtagtctctttgtattaccaaatagttggggtgttgactcctgtgtgttttgcaagaatgtgtggtaagcctgggtaaagagaaggaactgcggtgttgggagagtctttgtgttggggagtggcaggggatgatttgtttcaggggaaaatgcccacattttaacttttaaacttctgaataaactgtgtaaaaacagtaaaaaaaa

SEQ ID NO: 153 - DNA, 1711 bp, Homo sapiens
  misc_feature: Incyte ID No: 1635966CB1
tttgatacgggagttcctccttgctctcgcccctactctttctggtgttagatcgagctaccctctaaaagcagtttagagtggtaaaaaaaaaaaaaaaacacaccaaacgctcgcagccacaaaagggatgaaatttcttctggacatcctcctgcttctcccgttactgatcgtctgctccctagagtccttcgtgaagctttttattcctaagaggagaaaatcagtcaccggcgaaatcgtgctgattacaggagctgggcatggaattgtgagactgactgcctatgaatttgctaaacttaaaagcaagctggttctctgggatataaataagcatggactggaggaaacagctgccaaatgcaagggactgggtgccaaggttcatacctttgtggtagactgcagcaaccgagaagatatttacagctctgcaaagaaggtgaaggcagaaattggagatgttagtattttagtaaataatgctggtgtagtctatacatcagatttgtttgctacacaagatcctcagattgaaaagacttttgaagttaatgtacttgcacatttctggactacaaaggcatttcttcctgcaatgacgaagaataaccatggccatattgtcactgtggcttcggcagctggacatgtctcggtccccttcttactggcttactgttcaagcaagtttgctgctgttggatttcataaaactttgacagatgaactggctgccttacaaataactggagtcaaaacaacatgtctgtgtcctaatttcgtaaacactggcttcatcaaaaatccaagtacaagtttgggacccactctggaacctgaggaagtggtaaacaggctgatgcatgggattctgactgagcagaagatgatttttattccatcttctatagcttttttaacaacattggaaaggatccttcctgagcgtttcctggcagttttaaaacgaaaaatcagtgttaagtttgatgcagttattggatataaaatgaaagcgcaataagcacctagttttctgaaaactgatttaccaggtttaggttgatgtcatctaatagtgccagaattttaatgtttgaacttctgttttttctaattatccccatttcttcaatatcatttttgaggctttggcagtcttcatttactaccacttgttctttagccaaaagctgattacatatgatataaacagagaaatacctttagaggtgactttaaggaaaatgaagaaaaagaaccaaaatgactttattaaaataatttccaagattatttgtggctcacctgaaggctttgcaaaatttgtaccataaccgtttatttaacatatatttttatttttgattgcacttaaattttgtataatttgtgtttctttttctgttctacataaaatcagaaacttcaagctctctaaataaaatgaaggactatatctagtggtatttcacaatgaatatcatgaactctcaatgggtaggtttcatcctacccattgccactctgtttcctgagagatacctcacattccaatgccaaacatttctgcacagggaagctagaggtggatacacgtgttgcaagtataaaagcatcactgggatttaaggagaattgagagaatgtacccacaaatggcagcaataataaatggatcacacttaaaaaaaaaaaaaaa

SEQ ID NO: 154 - protein, 300 aa, Homo sapiens
  misc_feature: Incyte ID No: 1635966CD1
MKFLLDILLLLPLLIVCSLESFVKLFIPKRRKSVTGEIVLITGAGHGIVRLTAYEFAKLKSKLVLWDINKHGLEETAAKCKGLGAKVHTFVVDCSNREDIYSSAKKVKAEIGDVSILVNNAGVVYTSDLFATQDPQIEKTFEVNVLAHFWTTKAFLPAMTKNNHGHIVTVASAAGHVSVPFLLAYCSSKFAAVGFHKTLTDELAALQITGVKTTCLCPNFVNTGFIKNPSTSLGPTLEPEEVVNRLMHGILTEQKMIFIPSSIAFLTTLERILPERFLAVLKRKISVKFDAVIGYKMKAQ

SEQ ID NO: 155 - DNA, 1505 bp, Homo sapiens
  misc_feature: Incyte ID No: 199471.2
caggaaggctgagagaaagggcaggtccccgctgcgtggggctgggcttaaaggctcgtcgcgcctgccaaaggacctgacgacgtgctgcgtcgttacttttgaaacgcttggcggggaagtgctgttggagccgctgtggttgctgtccgcggagtggaagcgccgtgcttttgtttgtgtccctggccatggcgctgcagctctcccgggagcagggaatcaccctgcgcgggagcgccgaaatcgtggccgagttcttctcattcggcatcaacagcattttatatcagcgtggcatatatccatctgaaacctttactcgagtgcagaaatacggactcaccttgcttgtaactactgatcttgagctcataaaatacctaaataatgtggtggaacaactgaaagattggttatacaagtgttcagttcagaaactggttgtagttatctcaaatattgaaagtggtgaggtcctggaaagatggcagtttgatattgagtgtgacaagactgcaaaagatgacagtgcacccagagaaaagtctcagaaagctatccaggatgaaatccgttcagtgatcagacagatcacagctacggtgacatttctgccactgttggaagtttcttgttcatttgatctgctgatttatacagacaaagatttggttgtacctgaaaaatgggaagagtcgggaccacagtttattaccaattctgaggaagtccgccttcgttcatttactactacaatccacaaagtaaatagcatggtggcctacaaaattcctgtcaatgactgaggatgacatgaggaaaataatgtaattgtaattttgaaatgtggttttcctgaaatcaggtcatctatagttgatatgttttatttcattggttaatttttacatggagaaaaccaaaatgatacttactgaactgtgtgtaattgttccttttatttttttggtacctatttgacttaccatggagttaacatcatgaatttattgcacattgttcaaaaggaaccaggaggtttttttgtcaacattgtgatgtatattcctttgaagatagtaactgtagatggaaaaacttgtgctataaagctagatgctttcctaaatcagatgttttggtcaagtagtttgactcagtataggtagggagatatttaagtataaaatacaacaaaggaagtctaaatattcagaatctttgttaaggtcctgaaagtaactcataatctataaacaatgaaatattgctgtatagctccttttgaccttcatttcatgtatagttttccctattgaatcagtttccaattatttgactttaatttatgtaacttgaacctatgaagcaatggatatttgtactgtttaatgttctgtgatacagaactcttaaaaatgttttttcatgtgttttataaaatcaagttttaagtgaaagtgaggaaataaagttaagtttgttttaaatttgtcttaaaa

SEQ ID NO: 156 - DNA, 4270 bp, Homo sapiens
  misc_feature: Incyte ID No: 257645.8
  unsure 1874: a, t, c, g, or other
atccagctggcctgttagtaagggtgttccagtgctaggtggaggtggagtttggctgcctttggggagattggaagggtgaggaatagaggcctgatttctgagtgttgtttctgtgttggacaattctatgcaaactagagccaaaatggaagagggtgcaagtcccctcctggggccccagacgccccctcctttcttgctgcctggagcaggggcagtgctgttagtggctactcctggtgtgaacagcccatcctggccaccttccacaggaaacctgacctgaaggacagaagaggaaggaagcaggctttgccacaaatgtcagtgcagaactctggctggccccaccaagaagacagccccaagccccaggatccaggtccaccagccaactcagacagtgactcaggccacctgccgggggaggaccctgaggatacccatgctcaggtagtagagtcgtgcccttcctctgagaccaacatgtcctctatcctgtggagtggccacccttttccaccaacccggaggtagtttgacttcgtgcctaatctcttgttgcctttttctcttttcaggaattcctgtctctgcacctgcttagaacatggggttttgactttaaactcattcacatgagtattcattatctctcctagggggtctgtattgtcaaaccagactctaggggctttggccccaaggcgtgaagggggttaagaagggaaagcataagaagggaagctgttttggggtgtggggcctccccagcctccctcaaggaagaccacacatgcaggcatcagtcagctatccttgcactcagtgaggatctgcaaggaggaccctcccaaatggagggcatgcttagaagctgctctagattggagaagaggtggcaatgatgagggggaaagaaggagaaaggaaagaaaaacctagtttcactcctccccttcttccatgtctcctcagggtcctgcagttctgagcttgggttccctttgcctggacaccaaccaagcccccaactggactggacttcagaccctcctgcagcaactccctccgcaggacattgatgagcgctactgcctggcccttggggaggaggagcgggccgagctgcagctcttctgtgccaggcggaagcaggaagccctgggacagggggtagcccgcctggtacttcccaagcttgaaggacacacctgtgagaagtgtagggagttgctgaagccaggggagtacggagtgtttgcagcccgggcaggggaacagcgctgctggcaccagccttgctttgcctgccaggcctgtggccaggccctgataaacctcatctacttctaccatgatggacaactctactgcggccgtcatcatgcagagttgctgcgcccgcgctgcccggcttgtgaccagctgatcttctcctggcgctgcaccgaggcggagggacagcgctggcatgagaaccacttctgttgccaggactgcgccgggcctctgggcgggggacgttatgccctgcctgggggaagcccctgctgccccagctgcttcgagaaccgctactcggatgcaggctcgagctgggccggggcactggaagggcaggcattccttggggagactggactcgaccgaactgaaggaagggaccaaacctcggtgaactctgcaaccctctcccgaacactccttctcgctgctgccggcggttccagcctgcaaactcagagggggctgcctggatccagtccccagcaggagaaccgacctggggacaaagcggaggcacccaaagggcaggagcaatgccgcctggagactattcgtgatcccaaggacacccctttctccanctgctcctcctcctctgactcggaacctgaaggatttttcttaggcgagcgccttccccagtcctggaagacccccggaagcctccaagcagaggacagcaacgcctctaagacgcactgcaccatgtgctagtggcgcagctcagagaggggatgtgagtgggaggaaaggggtctgtaaagcgggagaacaaggctagcctccccctaacaatcctagactgagacgcagtcaggcgcacgcccgcaagaggcggcgaggtgacaagtttggagtgcgcccccttcagtactgcgcgttctaagacttttggcggagactttcttggcaaaacccattccccaaagctacgcttcccctgctgagatagcccctacccccacctgccacaggctgggacagccccgtccccaccatcctcctcccaagccaattaaatgatcacagcacgcgtgacagttaccggctggagagccggaggtgggaccgggagcaggggaccgtagaaccgggccgcgctcctcccctcctagagttcgtggaggcgcagcagagggccgtccctcttccggatgtcggactaagcgaacagcgcccccactgccggccggtagcagccggaagtgccagaccggaggtgcgtcattcaccggcgacgccgatacggttcctccaccgaggcccatgcgaagctttccactatggcttccagcactgtcccggtgagcgctgctggctcggctaatgaaactcccgaaataccggacaacgtgggagattggcttcggggcgtctaccgctttgccactgataggaatgacttccggaggaacttgatactaaatttgggactctttgctgcgggagtttggctggccaggaacttgagtgacattgacctcatggcacctcagccaggggtgtagccaagtagacaaatggaatcctgtgctgaacccgaatcttccaaaaaaacagcctacaatctgtgaccaccacaagatgtgccctgatggcagctgaagtttgattcagatgggcacttttcttccccttccctgcctagtttccttttgttccttgagtccacgcagaattccattctctggtcagcagacaggcttaagctaaagtattgcctctattctgtaaagttctgtacatagttcccaagcttctgcagggggtgatttttgctcttgtcctgagaaataacagtgctgttttaaaaaacatttgaaataaataccgcacacaaaggcagtcattttattcttttaataagaaacttttgcttacaaaaacaaggtgtaaaaagatttacaaaaatcataaaaacatgatttatatttcacacttgagagacaaaaacaagccccaaaacatggattttaatggaggtggtttgcttcattttaaaagggaaaaaaaaaaaaggaagctgtaaccatacattgatgttaacctagcatgaagtttattcttgaagaatttacattgttgagcaatattaggggaagaagccatttggtgttgcatagcattttagtgcaccagatgggttttccagacaccagggaggcatcattgctggaatagtgaggtttggtggcagaaagagggcagtgatgtgtagggggaggcaaagtgaagtaagcctgggcagtggtcactaaagtgacactgctgaggcagctgcttccttcagaaggaaatgttttgtgaccctaaaattcatggtagtgctactgtccagggtttgggggctctttggaaatggagtatgtacggaactggcatgtatagacttatatagccatagaaagaggtggatagaaacaggtccaccatggcaatatttttttctggccagtttactaggcattaaaaaaaatactgcttttatgtgccaagtctcttatggaactagtatgggattaaaggacgttaattggaaaggagggtcagtatataaggaccacagtggcctgttaaggatgacagatgtctctagcagtttgttcactactaaagttaaacaggacaaaatagtctttcttaatatttatgccagcaaggtcaggaaagactattttgtcctgaccttgctggcataaatattaagaaaattgtttgagaattagatttttttagtatgtatataaaaacagcaccattctttgtataaatcagatagatcttatctgatagatgaagctaagaccctttgagtctacactgggttgactctgagaggtttatatcttattgggtattaagataaagaagggtcacatgagagcaagcttagctttgaagccatcacctcccaaatggtgaccaaggaggaaacttttaagccatagtatagatgcaggtctaaatggggatagca

SEQ ID NO: 157 - DNA, 2096 bp, Homo sapiens
  misc_feature: Incyte ID No: 230488.25
gccctgggctcgcggcggtgccgcggggatggcgggagccggagctggagccggagctcgcggcggagcggcggcgggggtcgaggctcgagctcgcgatccaccgcccgcgcaccgcgcacatcctcgccaccctcggcctgcggctcagccctcggcccgcaggatggatggcgggtcagggggcctggggtctggggacaacgccccgaccactgaggctcttttcgtggcactgggcgcgggcgtgacggcgctcagccatcccctgctctacgtgaagctgctcatccaggtgggtcatgagccgatgccccccacccttgggaccaatgtgctggggaggaaggtcctctatctgccgagcttcttcacctacgccaagtacatcgtgcaagtggatggtaagatagggctgttccgaggcctgagtccccggctgatgtccaacgccctctctactgtgactcggggtagcatgaagaaggttttccctccagatgagattgagcaggtttccaacaaggatgatatgaagacttccctgaagaaagttgtgaaggagacctcctacgagatgatgatgcagtgtgtgtcccgcatgttggcccaccccctgcatgtcatctcaatgcgctgcatggtccagtttgtgggacgggaggccaagtacagtggtgtgctgagctccattgggaagattttcaaagaggaagggctgctgggattcttcgttggattaatccctcacctcctgggcgatgtggttttcttgtggggctgtaacctgctggcccacttcatcaatgcctacctggtggatgacagcttcagccaggccctggccatccggagctataccaagttcgtgatggggattgcagtgagcatgctgacctaccccttcctgctagttggcgacctcatggctgtgaacaactgcgggctgcaagctgggctccccccttactccccagtgttcaaatcctggattcactgctggaagtacctgagtgtgcagggccagctcttccgaggctccagcctgcttttccgccgggtgtcatcaggatcatgctttgccctggagtaacctgaatcatctaaaaaacacggtctcaacctggccaccgtgggtgaggcctgaccaccttgggacacctgcaagacgactccaacccaacaacaaccagatgtgctccagcccagccgggcttcagttccatatttgccatgtgtctgtccagatgtggggttgagcgggggtggggctgcacccagtggattgggtcacccggcagacctagggaaggtgaggcgaggtggggagttggcagaatccccatacctcgcagatttgctgagtctgtcttgtgcagagggccagagaatggcttatgggggcccaggttggatggggaaaggctaatggggtcagaccccaccccgtctacccctccagtcagcccagcgcccatcctgcagctcagctgggagcatcattctcctgctttgtacatagggtgtggtcccctggcacgtggccaccatcatgtctaggcctatgctaggaggcaaatggccaggctctgcctgtgtttttctcaacactacttttctgatatgagggcagcacctgcctctgaatgggaaatcatgcaactactcagaatgtgtcctcctcatctaatgctcatctgtttaatggtgatgcctcgcgtacaggatctggttacctgtgcagttgtgaatacccagaggttgggcagatcagtgtctctagtcctacccagttttaaagttcatggtaagatttgacctcatcccatcatgtcttctgtcttatctgttacctctctggggaaactggaattatggctctcaactgactgcccaagagagccccaaatctcagatcacattaccaccttctcagactctgctgccatcaatcccctacacccaaaaatccactgaaatctctgctgcatacagattggatttgcatgcatgcgtgttcacagaccatgaaacagtttaggcccctgacccctcactttgtttcatggtctgtgaacacgcatgcatgcaaatcc

SEQ ID NO: 158 - DNA, 3317 bp, Homo sapiens
  misc_feature: Incyte ID No: 2083883CB1
catggcctgactcgggacagctcagagcagggcagaactggggacactctgggccggccttctgcctgcatggacgctctgaagccaccctgtctctggaggaaccacgagcgagggaagaaggacagggactcgtgtggcaggaagaactcagagccgggaagcccccattcactagaagcactgagagatgcggccccctcgcagggtctgaatttcctgctgctgttcacaaagatgctttttatctttaactttttgttttccccacttccgaccccggcgttgatctgcatcctgacatttggagctgccatcttcttgtggctgatcaccagacctcaacccgtcttacctcttcttgacctgaacaatcagtctgtgggaattgagggaggagcacggaagggggtttcccagaagaacaatgacctaacaagttgctgcttctcagatgccaagactatgtatgaggttttccaaagaggactcgctgtgtctgacaatgggccctgcttgggatatagaaaaccaaaccagccctacagatggctatcttacaaacaggtgtctgatagagcagagtacctgggttcctgtctcttgcataaaggttataaatcatcaccagaccagtttgtcggcatctttgctcagaataggccagagtggatcatctccgaattggcttgttacacgtactctatggtagctgtacctctgtatgacaccttgggaccagaagccatcgtacatattgtcaacaaggctgatatcgccgtggtgatctgtgacacaccccaaaaggcattggtgctgatagggaatgtagagaaaggcttcaccccgagcctgaaggtgatcatccttatggacccctttgatgatgacctgaagcaaagaggggagaagagtggaattgagatcttatccctatatgatgctgagaacctaggcaaagagcacttcagaaaacctgtgcctcctagcccagaagacctgagcgtcatctgcttcaccagtgggaccacaggtgaccccaaaggagccatgataacccatcaaaatattgtttcaaatgctgctgcctttctcaaatgtgtggagcatgcttatgagcccactcctgatgatgtggccatatcctacctccctctggctcatatgtttgagaggattgtacaggctgttgtgtacagctgtggagccagagttggattcttccaaggggatattcggttgctggctgacgacatgaagactttgaagcccacattgtttcccgcggtgcctcgactccttaacaggatctacgataaggtacaaaatgaggccaagacacccttgaagaagttcttgttgaagctggctgtttccagtaaattcaaagagcttcaaaagggtatcatcaggcatgatagtttctgggacaagctcatctttgcaaagatccaggacagcctgggcggaagggttcgtgtaattgtcactggagctgcccccatgtccacttcagtcatgacattcttccgggcagcaatgggatgtcaggtgtatgaagcttatggtcaaacagaatgcacaggtggctgtacatttacattacctggggactggacatcaggtcacgttggggtgcccctggcttgcaattacgtgaagctggaagatgtggctgacatgaactactttacagtgaataatgaaggagaggtctgcatcaagggtacaaacgtgttcaaaggatacctgaaggaccctgagaagacacaggaagccctggacagtgatggctggcttcacacaggagacattggtcgctggctcccgaatggaactctgaagatcatcgaccgtaaaaagaacattttcaagctggcccaaggagaatacattgcaccagagaagatagaaaatatctacaacaggagtcaaccagtgttacaaatttttgtacacggggagagcttacggtcatccttagtaggagtggtggttcctgacacagatgtacttccctcatttgcagccaagcttggggtgaagggctcctttgaggaactgtgccaaaaccaagttgtaagggaagccattttagaagacttgcagaaaattgggaaagaaagtggccttaaaacttttgaacaggtcaaagccatttttcttcatccagagccattttccattgaaaatgggctcttgacaccaacattgaaagcaaagcgaggagagctttccaaatactttcggacccaaattgacagcctgtatgagcacatccaggattaggataaggtacttaagtacctgccggcccactgtgcactgcttgtgagaaaatggattaaaaactattcttacatttgttttgcctttcctcctatttttttttaacctgttaaactctaaagccatagcttttgttttatattgagacatataatgtgtaaacttagttcccaaataaatcaatcctgtctttcccatcttcgatgttgctaatattaaggcttcagggctacttttatcaacatgcctgtcttcaagatcccagtttatgttctgtgtccttcctcatgatttccaaccttaatactattagtaaccacaagttcaagggtcaaagggaccctctgtgccttcttctttgttttgtgataaacataacttgccaacagtctctatgcttatttacatcttctactgttcaaactaagagatttttaaattctgaaaaactgcttacaattcatgttttctagccactccacaaaccactaaaattttagttttagcctatcactcatgtcaatcatatctatgagacaaatgtctccgatgctcttctgcgtaaattaaattgtgtactgaagggaaaagtttgatcataccaaacatttcctaaactctctagttagatatctgacttgggagtattaaaaattgggtctatgacatactgtccaaaaggaatgctgttcttaaagcattatttacagtaggaactggggagtaaatctgttccctacagtttgctgctgagctggaagctgtgggggaaggagttgacaggtgggcccagtgaacttttccagtaaatgaagcaagcactgaataaaaacctcctgaactgggaacaaagatctacaggcaagcaagatgcccacacaacaggcttattttctgtgaaggaaccaactgatctcccccacccttggattagagttcctgctctaccttacccacagataacacatgttgtttctacttgtaaatgtaaagtctttaaaataaactattacagataaaaaaaaaaa

SEQ ID NO: 159 - protein, 739 aa, Homo sapiens [sequence omitted]

SEQ ID NO: 160 - DNA, 3469 bp, Homo sapiens
  misc_feature: Incyte ID No: 201928.3
gtcccgcggcgggttggctcgcgcttcgttgtcagatctgaggcgaggctaggtgagccgtgggaagaaaagagggagcagctagggcgcgggtctccctcctcccggagtttggaacggctgaagttcaccttccagcccctagcgccgttcgcgccgctaggcctggcttctgaggcggttgcggtgctcggtcgccgcctaggcggggcagggtgcgagcaggggcttcgggccacgcttctcttggcgacaggattttgctgtgaagtccgtccgggaaacggaggaaaaaaagagttgcgggaggctgtcggctaataacggttcttgatacatatttgccagacttcaagatttcagaaaaggggtgaaagagaagattgcaactttgagtcagacctgtaggcctgatagactgattaaaccacagaaggtgacctgctgagaaaagtggtacaaatactgggaaaaacctgctcttctgcgttaagtgggagacaatgtcacaagttaaaagctcttattcctatgatgccccctcggatttcatcaatttttcatccttggatgatgaaggagatactcaaaacatagattcatggtttgaggagaaggccaatttggagaataagttactggggaagaatggaactggagggctttttcagggcaaaactcctttgagaaaggctaatcttcagcaagctattgtcacacctttgaaaccagttgacaacacttactacaaagaggcagaaaaagaaaatcttgtggaacaatccattccgtcaaatgcttgttcttccctggaagttgaggcagccatatcaagaaaaactccagcccagcctcagagaagatctcttaggctttctgctcagaaggatttggaacagaaagaaaagcatcatgtaaaaatgaaagccaagagatgtgccactcctgtaatcatcgatgaaattctaccctctaagaaaatgaaagtttctaacaacaaaaagaagccagaggaagaaggcagtgctcatcaagatactgctgaaaagaatgcatcttccccagagaaagccaagggtagacatactgtgccttgtatgccacctgcaaagcagaagtttctaaaaagtactgaggagcaagagctggagaagagtatgaaaatgcagcaagaggtggtggagatgcggaaaaagaatgaagaattcaagaaacttgctctggctggaatagggcaacctgtgaagaaatcagtgagccaggtcaccaaatcagttgacttccacttccgcacagatgagcgaatcaaacaacatcctaagaaccaggaggaatataaggaagtgaactttacatctgaactacgaaagcatccttcatctcctgcccgagtgactaagggatgtaccattgttaagcctttcaacctgtcccaaggaaagaaaagaacatttgatgaaacagtttctacatatgtgccccttgcacagcaagttgaagacttccataaacgaacccctaacagatatcatttgaggagcaagaaggatgatattaacctgttaccctccaaatcttctgtgaccaagatttgcagagacccacagactcctgtactgcaaaccaaacaccgtgcacgggctgtgacctgcaaaagtacagcagagctggaggctgaggagctcgagaaattgcaacaatacaaattcaaagcacgtgaacttgatcccagaatacttgaaggtgggcccatcttgcccaagaaaccacctgtgaaaccacccaccgagcctattggctttgatttggaaattgagaaaagaatccaggagcgagaatcaaagaagaaaacagaggatgaacactttgaatttcattccagaccttgccctactaagattttggaagatgttgtgggtgttcctgaaaagaaggtacttccaatcaccgtccccaagtcaccagcctttgcattgaagaacagaattcgaatgcccaccaaagaagatgaggaagaggacgaaccggtagtgataaaagctcaacctgtgccacattatggggtgccttttaagccccaaatcccagaggcaagaactgtggaaatatgccctttctcgtttgattctcgagacaaagaacgtcagttacagaaggagaagaaaataaaagaactgcagaaaggggaggtgcccaagttcaaggcacttcccttgcctcattttgacaccattaacctgccagagaagaaggtaaagaatgtgacccagattgaacctttctgcttggagactgacagaagaggtgctctgaaggcacagacttggaagcaccagctggaagaagaactgagacagcagaaagaagcagcttgtttcaaggctcgtccaaacaccgtcatctctcaggagccctttgttcccaagaaagagaagaaatcagttgctgagggcctttctggttctctagttcaggaaccttttcagctggctactgagaagagagccaaagagcggcaggagctggagaagagaatggctgaggtagaagcccagaaagcccagcagttggaggaggccagactacaggaggaagagcagaaaaaagaggagctggccaggctacggagagaactggtgcataaggcaaatccaatacgcaagtaccagggtctggagataaagtcaagtgaccagcctctgactgtgcctgtatctcccaaattctccactcgattccactgctaaactcagctgtgagctgcggataccgcccggcaatgggacctgctcttaacctcaaacctaggaccgtcttgctttgtcattgggcatggagagaacccatttctccagacttttacctacccgtgcctgagaaagcatacttgacaactgtggactccagttttgttgagaattgttttcttacattactaaggctaataatgagatgtaactcatgaatgtctcgattagactccatgtagttacttcctttaaaccatcagccggccttttatatgggtcttcactctgactagaatttagtctctgtgtcagcacagtgtaatctctattgctattgccccttacgactctcaccctctccccactttttttaaaaattttaaccagaaaataaagatagttaaatcctaagatagagattaagtcatggtttaaatgaggaacaatcagtaaatcagattctgtcctcttctctgcataccgtgaatttatagttaaggatccctttgctgtgagggtagaaaacctcaccaactgcaccagtgaggaagaagactgcgtggattcatggggagcctcacagcagccacgcagcaggctctgggtggggctgccgttaaggcacgttctttccttactggtgctgataacaacagggaaccgtgcagtgtgcattttaagacctggcctggaataaatacgttttgtctttccctcaa

SEQ ID NO: 161 - DNA, 1972 bp, Homo sapiens
  misc_feature: Incyte ID No: 2746976CB1
acaggggcttccccttcgccgccgccgccgccgccggccaagctccgccgcgcccgcggcccgcggccgccatgcagtttatgttgctttttagtcgtcagggaaagcttcgactgcaaaaatggtatgtcccactatcagacaaagagaagagaaagatcacaagagaacttgttcagaccgttttagcacggaaacctaaaatgtgcagcttccttgagtggcgagatctgaagattgtttacaaaagatatgctagtctgtatttttgctgtgctattgaggatcaggacaatgaactaattaccctggaaataattcatcgttatgtggaattacttgacaagtatttcggcagtgtctgtgaactagatatcatctttaattttgagaaggcttattttattttggatgagtttcttttgggaggggaagttcaggaaacatccaagaaaaatgtccttaaagcaattgagcaggctgatctactgcaggaggatgcgaaagaagctgaaaccccacgtagtgttcttgaagaaattggactgacataactctcctcccttgttgatgacttcttgtggcatttcacacactgtagatggtcactcccttcatgtccatgttagctcatggtgtaagatgatgtcttgtcagtattactgttttgctaagccgcttcattcatgcctacacaatttttttttaaaagggaactttagttaattaagtgataagggacttaaatatgaattagaatggtgcagaaagagataccttttctggatattttaaagtttaaaggtcagtttctcttaatctgattatgtgcacatatgaaaatggcacatcatatacatgtaaaatcaggcagtatacatttattaattactgtatttgacaaaggaaactcttaaattataatgtgaaacctggttttatgaaaccaaagactagtgcagcatttcagcatatgtaaaaaaaaaaaaaaagggaattgacatgtcacatatcaaatgaatggaaactttgttgaaactttaaaaagcaaatttactccaaagacttgtattggaaattacataccttttttttttttttttaaaggactacagattatttttaatgactaaattggagtgatacttcttacactaaaaattatttcttaggcattctgaatctgggatgagaaacaggattgtttcacaatagtaagcacataatttttaaggccaaggcacatttgactcctgagatgaattttttgtggtcataatcaaatacttagttgtttttgatgccccaaaataaagtgagaatggtaatttgccaggaattcttcataacagtatcttacaaaaaacgtgttgctctcttcacagtattatgtgtaaagtcattgtttaaagcacgaatgttccctctggggtacttgttaaagctaaatttattttgcttccctccacttagaagtgctgcacactttacagcagcttcctttctttccatggcactgcctagttaacagaagtcttataaaaatttaaaaagacacatttcttacaaaaaagagttgaatgaggtaaaatggcattagatggctctatattttttaaagctatgtaattgttcagcgtcacttttctaagtacttatacatatctaaacatgtcttcatggtttatattttcacttatatatgctgggctggattaagctttgttgtgattgtgaccaacattcaggccacgtgagcactgtcttatcacatcgccaattagttgtaataaacgttcaacgtacaaacactggagtgtgtttttatctctttccaaaagtttgtcaaactatgcagagctgctgaaggaagaatttctcatttttttttcagtaaaatgttgaaaattcccctccatttgaatatggtggttgttataagcacacacaagatacatggtggaagatctag

SEQ ID NO: 162 - protein, 160 aa, Homo sapiens
  misc_feature: Incyte ID No: 2746976CD1
MQFMLLFSRQGKLRLQKWYVPLSDKEKRKITRELVQTVLARKPKMCSFLEWRDLKIVYKRYASLYFCCAIEDQDNELITLEIIHRYVELLDKYFGSVCELDIIFNFEKAYFILDEFLLGGEVQETSKKNVLKAIEQADLLQEDAKEAETPRSVLEEIGLT

SEQ ID NO: 163 - DNA, 758 bp, Homo sapiens
  misc_feature: Incyte ID No: 369213.2
aaaagctgatccacaaacaagaggagcaccagacctcctcttggcttcgagatggcttcgccacaccaagagcccaaacctggagacctgattgagattttccgccttggctatgagcactgggccctgtatataggagatggctacgtgatccatctggctcctccaagtgagtaccccggggctggctcctccagtgtcttctcagtcctgagcaacagtgcagaggtgaaacgggagcgcctggaagatgtggtgggaggctgttgctatcgggtcaacaacagcttggaccatgagtaccaaccacggcccgtggaggtgatcatcagttctgcgaaggagatggttggtcagaagatgaagtacagtattgtgagcaggaactgtgagcactttgtcacccagctgagatatggcaagtcccgctgtaaacaggtggaaaaggccaaggttgaagtcggtgtggccacggcgcttggaatcctggttgttgctggatgctcttttgcgattaggagataccaaaaaaaagcgacagcctgaagcagccacaaaatcctgtgttagaagcagctgtgggggtcccagtggagatgagcctcccccatgcctccagcagcctgaccctcgtgccctgtctcaggcgttctctagatcctttcctctgtttccctctctcgctggcaaaagtatgatctaattgaaacaagactgaaggatcaataaacagccatctgccccttcaaaaaggactt

SEQ ID NO: 164 - DNA, 5245 bp, Homo sapiens
  misc_feature: Incyte ID No: 1330220.16
gcggcggcggctggggagggttcttccggaaggttcgggaggcttctggaaaaagcgccgcgcgctgggcgggcccgtcgctatataaggcaggcgcgggggtggcgcgtcagttgcttcagcgtcccggtgtggctgtgccgttggtcctgtgcggtcacttagccaagatgcctgaggaaacccagacccaagaccaaccgatggaggaggaggaggttgagacgttcgcctttcagggcagaaattgcccagttgatgtcattgatcatcaatactttctactcgaacaaagagatctttctgagagagctcatttcaaattcatcagatgcattggacaaaatccggtatgaaagcttgacagatcccagtaaattagactctgggaaagagctgcatattaaccttataccgaacaaacaagatcgaactctcactattgtggatactggaattggaatgaccaaggctgacttgatcaataaccttggtactatcgccaagtctgggaccaaagcgttcatggaagctttgcaggctggtgcagatatctctatgattggccagttcggtgttggtttttattctgcttatttggttgctgagaaagtaactgtgatcaccaaacataacgatgatgagcagtacgcttgggagtcctcagcagggggatcattcacagtgaggacagacacaggtaggcacctgaacattcactggttaagtgagcggtggaagggtggggtgctgcaacccttggacccctggggatgcggtgaagcttacagaatttgtgtttgcccaacgatcaggaacaagctagagcacttaattagtgtaatggcatgacttggtgggcggttcttttgggcgaggcaccttgcccaaaaggttctgctgtggtggcctttgcatctgtagtaacggcaaaccttgctttatagacacgttataagggtgttaggcatggcgttgagcactaaattgaatgtattattaagtcaatttttctttcttctcttgcaggtgaacctatgggtcgtggaacaaaagttatcctacacctgaaagaagaccaaactgagtacttggaggaacgaagaataaaggagattgtgaagaaacattctcagtttattggatatcccattactcttttttgatgtgatttcgtgttttcttttgaaggtggagaaggaacgtgataaagaagtaagcgatgatgaggctgaagaaaaggaagacaaaaaaaaaaaaaaagaaaaagaagagaaagagtcggaagacaaacctgaaattgaagatgttggttctgatgaggaagaagaaaagaaggatggtgacagaagagaagaagagataggaaagtacatcgatcaagaagagctcaacaaaacaaagcccatctggaccagaaatcccgacgatattactaatgaggagtacggagaattctataagagcttgaccaatgactgggaagatcacttggcagtgaagcatttttcagttgaaggacagttggaattcagagcccttctatttgtcccacgacgtgctccttttgatctgtttgaaaacagaaagaaaaagaacaatatcaaattgtatgtacgcagagttttcatcatggataactgtgaggagctaatccctgaatatctgaacttcattagaggggtggtagactcggaggatctccctctaaacatatcccgtgagatgttgcaacaaagcaaaattttgaaagttatcaggaagaatttggtcaaaaaatgcttagaactctttactgaactggcggaagataaagagaactacaagaaattctatgagcagttctctaaaaacataaagcttggaatacacgaagactctcaaaatcggaagaagctttcagagctgttaaggtactacacatctgcctctggtgatgagatggtttctctcaaggactactgcaccagaatgaaggagaaccagaaacatatctattatatcacaggtgagaccaaggaccaggtagctaactcagcctttgtggaacgtcttcggaaacatggcttagaagtgatctatatgattgagcccattgatgagtactgtgtccaacagctgaaggaatttgaggggaagactttagtgtcagtcaccaaagaaggcctggaacttccagaggatgaagaagagaaaaagaagcaggaagagaaaaaaacaaagtttgagaacctctgcaaaatcatgaaagacatattggagaaaaaagttgaaaaggtggttgtgtcaaaccgattggtgacatctccatgctgtattgtcacaagcacatatggctggacagcaaacatggagagaatcatgaaagctcaagccctaagagacaactcaacaatgggttacatggcagcaaagaaacacctggagataaaccctgaccattccattattgagaccttaaggcaaaaggcagaggctgataagaacgacaagtctgtgaaggatctggtcatcttgctttatgaaactgcgctcctgtcttctggcttcagtctggaagatccccagacacatgctaacaggatctacaggatgatcaaacttggtctgggtattgatgaagatgaccctactgctgatgataccagtgctgctgtaactgaagaaatgccaccccttgaaggagatgacgacacatcacgcatggaagaagtagactaatctctggctgagggatgacttacctgttcagtactctacaattcctctgataatatattttcaaggatgtttttctttatttttgttaatattaaaaagtctgtatggcatgacaactactttaaggggaagataagatttctgtctactaagtgatgctgtgataccttaggcactaaagcagagctagtaatgctttttgagtttcatgttggtttattttcacagattggggtaacgtgcactgtaagacgtatgtaacatgatgttaactttgtggtctaaagtgtttagctgtcaagccggatgcctaagtagaccaaatcttgttattgaagtgttctgagctgtatcttgatgtttagaaaagtattcgttacatcttgtaggatctacttttcgaacttttcattccctgtagttgacaattctgcatgtactagtcctctagaaataggttaaactgaagcaacttgatggaaggatctctccacagggcttgttttccaaagaaaagtattgtttggaggagcaaagttaaaagcctacctaagcatatcgtaaagctgttcaaaaataactcagacccagtcttgtggatggaaatgtagtgctcgagtcacattctgcttaaagttgtaacaaatacagatgagttaaaagatattgtgtgacagtgtcttatttagggggaaaggggagtatctggatgacagttagtgccaaaatgtaaaacatgaggcgctagcaggagatggttaaacactagctgctccaagggttgacatggtcttcccagcatgtactcagcaggtgtggggtggagcacatgtaggcacagaaaacaggaatgcagacaacatgcatcccctgcgtccatgagttacatgtgttctcttagtgtccacgttgttttgatgttattcatggaataccttctgtgctaaatacagtcacttaattccttgaataacatcaaaacaacgtggacactaagagaacacatgtaactcatggacgcaggggatgcatgttgtctgcattcctgttttctgtgcctacatgtgctccaccccacacctgctgagtacatgctgggaagaccatgtcaacccttggagcagctagtgtttaaccatctcctgctagcgcctcatgttttacattttggcactaactgtcatccagatactcccctttccccctaaataagacactgtcacacaatatcttttaactcatctgtatttgttacaactttaagcagaatgtgactcgagcactacatttccatccacaagactgggtctgagttatttttgaacagctttacgatatgcttaggtaggcttttaactttgctcctccaaacaatacttttctttggaaaacaagccctgtggagagatccttccatcaagttgcttcagtttaacctatttctagaggactagtacatgcagaattgtcaactacagggaatgaaaagttcaaaaagtagatcctacaagatgtaacgaatacttttctaaacatcaagatacagctcagaacacttcaataacaagatttggtctacttaggcatccggcttgacagctaaacactttagaccacacaaagttaacatcatgttacatacgtcttacagtgcacgttaccccaatctgtgaaaataaaccaacatgaaactcaaaaagcattactagctctgctttagtgcctaaggtatcacagcatcacttagtagacagaaatcttatcttccccttaaagtagttgtcatgccatacagactttttaatattaacaaaaataaagaaaaacatccttgaaaatatattatcagaggaattgtagagtactgaacaggtaagtcatccctcagccagagattagtctacttcttccatgcgtgatgtgtcgtcatctccttcaaggggtggcatttcttcagttacagcagcactggtatcatcagcagtagggtcatcttcatcaatacccagaccaagtttgatcatcctgtagatcctgttagcatgtgtctggggatcttccagactgaagccagaagacaggagcgcagtttcataaagcaagatgaccagatccttcacagacttgtcgttcttatcagcctctgccttttgccttaaggtctcaataatggaatggtcagggtttatctccaggtgtttctttgctgccatgtaacccattgttgagttgtctcttagggcttgagctttcatgattctctccatgtttgctgtccagccatatgtgcttgtgacaatacagcatggagatgtcaccaatcggtttgacacaaccacctgtaatcaaaaagtgatgactaggaacctagaaagattaattcctaaactttcattgtgaaatgaaatctgtagaacccaaatttcaatagatcccaaatactatctactgtcaaataccacttaaatgtcgcattaggtatcccaagagccccaggttataatttcatgttttacatgcacca

SEQ ID NO: 165 - DNA, 770 bp, Homo sapiens
  misc_feature: Incyte ID No: 027351.2
gggggaggaagagcgttttggggacgggggctggtgaggctcacgttggagggcttcgcgtctgcttcggagaccgtaaggatattgatgaccatgagatccctgctcagaacccccttcctgtgtggcctgctctgggccttttgtgccccaggcgccagggctgaggagcctgcagccagcttctcccaacccggcagcatgggcctggataagaacacagtgcacgaccaagagcatatcatggagcatctagaaggtgtcatcaacaaaccagaggcggagatgtcgccacaagaattgcagctccattacttcaaaatgcatgattatgatggcaataatttgcttgatggcttagaactctccacagccatcactcatgtccataaggaggaagggagtgaacaggcaccactaatgagtgaagatgaactgattaacataatagatggtgttttgagagatgatgacaagaacaatgatggatacattgactatgctgaatttgcaaaatcactgcagtagatgttatttggccatctcctggttatatacaaatgtgacccgtgataatgtgattgaacactttagtaatgcaaaataactcatttccaactactgctgcagcattttggtaaaaacctgtagcgattcgttacactggggtgagaagagataagagaaatgaaagagaagagaaatgggacatctaatagtccctaagtgctattaaataccttattggacaagggcttgcttcaagcatc

SEQ ID NO: 166 - DNA, 1353 bp, Homo sapiens
  misc_feature: Incyte ID No: 337119.8
gaattcggggctgccgccgccgcgcccgggcgcacccgcccgctcgctgtcccgcgcaccccgtagcgcctcgggctcccgggccggacagaggagccagcccggtgcgcccctccacctcctgctcggggggctttaatgagacacccaccgctgctgtggggccggcggggagcagcaccgcgacggggaccggggctgggcgctggagccagaatcggaaccacgatgtgactccgccgccggggacccgtgaggtttgtgtggaccccgagttccaccaggtgagaagagtgatgaccatccttttccttactatggttatttcatactttggttgcatgaaggctgcccccatgaaagaagcaaacatccgaggacaaggtggcttggcctacccaggtgtgcggacccatgggactctggagagcgtgaatgggcccaaggcaggttcaagaggcttgacatcattggctgacactttcgaacacatgatagaagagctgttggatgaggaccagaaagttcggcccaatgaagaaaacaataaggacgcagacttgtacacgtccagggtgatgctcagtagtcaagtgcctttggagcctcctcttctctttctgctggaggaatacaaaaattacctagatgctgcaaacatgtccatgagggtccggcgccactctgaccctgcccgccgaggggagctgagcgtgtgtgacagtattagtgagtgggtaacggcggcagacaaaaagactgcagtggacatgtcgggcgggacggtcacagtccttgaaaaggtccctgtatcaaaaggccaactgaagcaatacttctacgagaccaagtgcaatcccatgggttacacaaaagaaggctgcaggggcatagacaaaaggcattggaactcccagtgccgaactacccagtcgtacgtgcgggcccttaccatggatagcaaaaagagaattggctggcgattcataaggatagacacttcttgtgtatgtacattgaccattaaaaggggaagatagtggatttatgttgtatagattagattatattgagacaaaaattatctatttgtatatatacataacagggtaaattattcagttaagaaaaaaataattttatgaactgcatgtataaatgaagtttatacagtacagtggttctacaatctatttattggacatgtccatgaccagaagggaaacagtcatttgcgcacaacttaaaaagtctgcattacattccttgataatgttgtggtttgttgccgttgccaagaactgaaaacataaaaagttaaaaaaaataataaattgcatgctgcccgaattc

SEQ ID NO: 167 - DNA, 4599 bp, Homo sapiens
  misc_feature: Incyte ID No: 235636.1
ggagcccgcgccccgcccgccgcgcctctgccgggacccacccgcagcggagggctgagcccgccggcggctccccggagctcacccacctccgcgcgccggagcgcaggcaaaaggggaggaaaggctcctctctttagtcaccactctcgccctctccaagaatttgtttaacaaagcgctgaggaaagagaacgtcttcttgaattctttagtaggggcggagtctgctgctgccctgcgctgccacctcggctacactgccctccgcgacgacccctgaccagccggggtcacgtccgggagacgggatcatgaagcgctcggtagccgtctggctcttggtcgggctcagcctcggtgtcccccagttcggcaaaggtgatatttgtgatcccaatccatgtgaaaatggaggtatctgtttgccaggattggctgatggttccttttcctgtgagtgtccagatggcttcacagaccccaactgttctagtgttgtggaggttgcatcagatgaagaagaaccaacttcagcaggtcctgcactcctaatccatgccataatggaggaacctgtgaaataagtgaagcataccgaggggatacattcataggctatgtttgtaaatgtccccgaggatttaatgggattcactgtcagcacaacataaatgaatgcgaagttgagccttgcaaaaatggtggaatatgtacagatcttgttgctaactattcctgtgagtgcccaggcgaatttatgggaagaaattgtcaatacaaatgctcaggcccactgggaattgaaggtggaattatatcaaaccagcaaatcacagcttcctctactcaccgagctctttttggactccaaaaatggtatccctactatgcacgtcttaataagaaggggcttataaatgcgtggacagctgcagaaaatgacagatggccgtggattcagataaatttgcaaaggaaaatgagagttactggtgtgattacccaaggagccaagaggattggaagcccagagtatataaaatcctacaaaattgcctacagtaatgatggaaagacttgggcaatgtacaaagtgaaaggcaccaatgaagacatggtgtttcgtggaaacattgataacaacactccatatgctaactctttcacaccccccataaaagctcagtatgtaagactctatccccaagtttgtcgaagacattgcactttgcgaatggaacttcttggctgtgaactgtcgggttgttctgagcctctgggtatgaaatcaggacatatacaagactatcagatcactgcctccagcatcttcagaacgctcaacatggacatgttcacttgggaaccaaggaaagctcggctggacaagcaaggcaaagtgaatgcctggacctctggccacaatgaccagtcacaatggttacaggtggatcttcttgttccaaccaaagtgactggcatcattacacaaggagctaaagattttggtcatgtacagtttgttggctcctacaaactggcttacagcaatgatggagaacactggactgtataccaggatgaaaagcaaagaaaagataaggttttccagggaaattttgacaatgacactcacagaaaaaatgtcatcgaccctcccatctatgcacgacacataagaatccttccttggtcctggtacgggaggatcacattgcggtcagagctgctgggctgcacagaggaggaatgaggggaggctacatttcacaaccctcttccctatttccctaaaagtatctccatggaatgaactgtgcaaaatctgtaggaaactgaatggttttttttttttttttcatgaaaaagtgctcaaattatggtaggcaactaacggtgtttttaagggggtctaagcctgccttttcaatgatttaatttgattttattttatccgtcaaatctcttaagtaacaacacattaagtgtgaattacttttctctcattgtttcctgaattattcgcattggtagaaatatattagggaaagaaagtagccttctttttatagcaagagtaaaaaagtctcaaagtcatcaaataagagcaagagttgatagagcttttacaatcaatactcacctaattctgataaaaggaatactgcaatgttagcaataagtttttttcttctgtaatgactctacgttatcctgtttccctgtgcctaccaaacactgtcaatgtttattacaaaattttaaagaagaatatgtaacatgcagtactgatattataattctcattttactttcattatttctaataagagattatgtgacttctttttcttttagttctattctacattcttaatattgtatattacctgaataattcaatttttttctaattgaatttcctattagttgactaaaagaagtgtcatgtttactcatatatgtagaacatgactgcctatcagtagattgatctgtatttaatattcgttaattaaatctgcagttttatttttgaaggaagccataactatttaatttccaaataattgcttcataaagaatcccatactctcagtttgcacaaaagaacaaaaaatatatatgtctctttaaatttaaatcttcatttagatggtaattacatatccttatatttactttaaaaaatcggcttatttgtttattttataaaaaatttagcaaagaaatattaatatagtgctgcatagtttggccaagcatactcatcatttctttgttcagctccacatttcctgtgaaactaacatcttattgagatttgaaactggtggtagtttcccaggaaggcacaggtggagttatttgtgagaagcaaagtgtttactaatgacaaagtagtaaaccattttcaagatgaaaactgatttctatttattttgcttcaaaggtcctgaaaaaataagcaattatcataacaatttgttattgatactggaggtttcattgacatgtctctcaaattaaagctcacactgcctccataaaagtcttcaacatctaatttataagctttacaagtatttattttataaggcttagacagaattattggagttttaaattaagtgtattggaaaagaaaggatggtatgtgtatgaaatgttaagatcctacgcaacactgctatttttttcctttaatatttgtgctgcataacaaaagccactagactgttactgtcttgtctgtccatgtgttaacagcatttcttaatgatgtatatatggagtggtcttcaatcatagtgaagaatttaaagagaaagtcaattgtattggcatttttaataagaacaaaattagttcgtctaaggggactggctggccacatatttgttccttgcccatatgctttctacttcttgttcttattatgaaattatgaatttgaagcctctgaaatggtgatcagttttcaacatctttcaaaaacaaaattactatttcctccatattgccttttttagataactttaaagttaggattttaaaatatttgtaactggctaaattttaaagtcgtgacaaataattacttaggttcagaaatatacacacacttactctttagccagtttctttcaaggtttactgtcccatcagatatctagccattttcctttgcaaattacataccttcttaagagtgtatttttaagattattacttatgctttatgatgatatagtttttcaaaattatttatagcttcatatgatgttttgtaattttttctattgatacctgttttaaaaatattttccaaggaagttgattaaaattatatttgttaccttttagaaaaagcattgaaatgagtttctcttgctttttcattttccctctgctttatatgctcttcgcaatacatcatgtccaacgggatacctattgttctcatgacacccaaaattgatgagagcaaaggggtcgcaccatatggaaatgttgaaaactattgtaaagtagtattatgaagtagcttttgtgtcattcatgtcgatgacatgaaagtgaagtaaatttattctatgtaaattcacactaaaaccagtacagtaccataagtagaatacatgtaagaatcacctagtcttcactatattgagtaaatataacatgctaattttacaattaatgaaactaaacttttaaacatctccattatatctacatccttttgaaggtatttatcatagttgccaattttaattttaggattgactttctctttctgaatgacttcataaagtttggtgtgaattttgaagacttgggttactaatgattgtatctttgctagtcaacaacttatgaaatatactcaatgcgtctgatgtgtcattaagtgcagaaataactaagacacaaataacctttgcaaaccttcaagctgtgtaatattccaatgttgtttttttctttgtatatatacttatatcacgtaggatgtaaaaccagtatgaccttgtctagtctccaaacttaaaataaacttttgaaaagctgggaaaaacaaaaaaaaagggg

SEQ ID NO: 168 - DNA, 6303 bp, Homo sapiens
  misc_feature: Incyte ID No: 276050.5
taagcttgcgccgcagctccccggcggaggcaagaggtggttgggggggaccatggctgacgttttcccgggcaacgactccacggcgtctcaggacgtggccaaccgcttcgcccgcaaaggggcgctgaggcagaagaacgtgcacgaggtgaaggaccacaaattcatcgcgcgcttcttcaagcagcccaccttctgcagccactgcaccgacttcatctgggggtttgggaaacaaggcttccagtgccaagtttgctgttttgtggtccacaagaggtgccatgaatttgttactttttcttgtccgggtgcggataagggacccgacactgatgaccccaggagcaagcacaagttcaaaatccacacttacggaagccccaccttctgcgatcactgtgggtcactgctctatggacttatccatcaagggatgaaatgtgacacctgcgatatgaacgttcacaagcaatgcgtcatcaatgtccccagcctctgcggaatggatcacactgagaagagggggcggatttacctaaaggctgaggttgctgatgaaaagctccatgtcacagtacgagatgcaaaaaatctaatccctatggatccaaacgggctttcagatccttatgtgaagctgaaacttattcctgatcccaagaatgaaagcaagcaaaaaaccaaaaccatccgctccacactaaatccgcagtggaatgagtcctttacattcaaattgaaaccttcagacaaagaccgacgactgtctgtagaaatctgggactgggatcgaacaacaaggaatgacttcatgggatccctttcctttggagtttcggagctgatgaagatgccggccagtggatggtacaagttgcttaaccaagaagaaggtgagtactacaacgtacccattccggaaggggacgaggaaggaaacatggaactcaggcagaaattcgagaaagccaaacttggccctgctggcaacaaagtcatcagtccctctgaagacaggaaacaaccttccaacaaccttgaccgagtgaaactcacggacttcaatttcctcatggtgttgggaaaggggagttttggaaaggtgatgcttgccgacaggaagggcacagaagaactgtatgcaatcaaaatcctgaagaaggatgtggtgattcaggatgatgacgtggagtgcaccatggtagaaaagcgagtcttggccctgcttgacaaacccccgttcttgacgcagctgcactcctgcttccagacagtggatcggctgtacttcgtcatggaatatgtcaacggtggggacctcatgtaccacattcagcaagtaggaaaatttaaggaaccacaagcagtattctatgcggcagagatttccatcggattgttctttcttcataaaagaggaatcatttatagggatctgaagttagataacgtcatgttggattcagaaggacatatcaaaattgctgactttgggatgtgcaaggaacacatgatggatggagtcacgaccaggaccttctgtgggactccagattatatcgccccagagataatcgcttatcagccgtatggaaaatctgtggactggtgggcctatggcgtcctgttgtatgaaatgcttgccgggcagcctccatttgatggtgaagatgaagacgagctatttcagtctatcatggagcacaacgtttcctatccaaaatccttgtccaaggaggctgtttctatctgcaaaggactgatgaccaaacacccagccaagcggctgggctgtgggcctgagggggagagggacgtgagagagcatgccttcttccggaggatcgactgggaaaaactggagaacagggagatccagccaccattcaagcccaaagtgtgtggcaaaggagcagagaactttgacaagttcttcacacgaggacagcccgtcttaacaccacctgatcagctggttattgctaacatagaccagtctgattttgaagggttctcgtatgtcaacccccagtttgtgcaccccatcttacagagtgcagtatgaaactcaccagcgagaacaaacacctccccagcccccagccctccccgcagtgggaagtgaatccttaaccctaaaattttaaggccacggccttgtgtctgattccatatggaggcctgaaaattgtagggttattagtccaaatgtgatcaactgttcagggtctctctcttacaaccaagaacattatcttagtggaagatggtacgtcatgctcagtgtccagtttaattctgtagaagttacgtctggctctaggttaacccttcctagaaagcaagcagactgttgccccattttgggtacaatttgatatactttccataccctccatctgtggatttttcagcattggaatcccccaaccagagatgttaaagtgagcctgtcccaggaaacatctccacccaagacgtctttggaatccaagaacaggaagccaagagagtgagcagggagggattgggggtgggggaggcctcaaaataccgactgcgtccattctctgcctccatggaaacagcccctagaatctgaaaggccgggataaacctaatcactgttcccaaacattgacaaatcctaacccaaccatggtccagcagttaccagtttaaacaaaaaaacctcagatgagtgttgggtgaatctgtcatctggtaccctccttggttgataactgtcttgatacttttcattctttgtaagaggccaaatcgtctaaggacgttgctgaacaagcgtgtgaaatcatttcagatcaaggataagccagtgtgtacatatgttcattttaatctctgggagattatttttccatccagggtgccatcagtaatcatgccactactcaccagtgttgttcgccaacacccacccccacacacaccaacattttgctgcctaccttgttatccttctcaagaagctgaagtgtacgccctctccccttttgtgcttatttatttaataggctgcagtgtcgcttatgaaagtacgatgtacagtaacttaatggaagtgctgactctagcatcagcctctaccgattgattttcctcccttctctagccctggatgtccacttagggataaaaagaatatggttttggttcccatttctagttcacgttgaatgacaggcctggagctgtagaatcaggaaacccggatgcctaacagctcaaagatgttttgttaaaacagctcaaagatgttttgttaatagaaggattttaatacgttttgcaaatgcatcatgcaatgaattttgcatgtttataataaaccttaataacaagtgaatctatattattgatataatcgtatcaagtataaagagagtattataataattttataagacacaattgtgctctatttgtgcaggttcttgtttctaatcctcttttctaattaagttttagctgaatcccttgcttctgtgctttccctccctgcacatgggcactgtatcagatagattactttttaaatgtagataaaatttcaaaaatgaatggctagtttacgtgatagattaggctcttactacatatgtgtgtgtatatatatgtatttgattctacctgcaaacaaatttttattggtgaggactatttttgagctgacactccctcttagtttcttcatgtcacctttcgtcctggttcctccgccactcttcctcttggggacacaggaagtgtctgattccagtctgcctagtacgttggtacacacgtggcattgcgcagcacctgggctgacctttgtgtgtagcgtgtgtgtgtgtttccttcttcccttcagcctgtgactgttgctgactccaggggtgggagggatggggagactcccctcttgctgtgtgtactggacacgcaggaagcatgctgtcttgctgcctctgcaacgacctgtcgtttgctccagcatgcacaaacttcgtgagaccaacacagccgtgccctgcaggcaccagcacgtgcttttcagaggctgcggactttcttccagccattgtggcattggcctttccagtcttgggaggagcacgctgctttggtgagacacccccatgcaaagggtcctcagagtagccgggttctaccacaaacagaaacagaatgaaagtagctgtcagtccttgtagagagccgctctgtttcctcccagaagcatctcccagctaagctcgcattatttttctcctctggctgtttgcctgaagttcacagaacacacaaccatgaaaggctttttgaggtgagaggcccaggtggtcctggcaaccctgagtagaaggagagacggggtagggaacgggcccggccagaaaagaaccatttcttctgccatcttttatgcaccatagacatcgagactccagggggtcctggctcccctgtccttgcagccctgcaggtcagtgcatgatctgggttcgtgtcctgaccaggtgctcctcctttgatccgaggggaaagggactggtttatagaaagagcctaggagacaaaagggccagtccccctgcccagaatggagcagcagcaggacagacccccacgaggccccccagagaggaggaagatcccacggaggaacacatgaggttagggacccttgttcagcaccccaaacagcctgcctgtttaaagcaggcagcaggcttaggccttccctgcaaccccaacacccacaagtttgtttctctaggaaacacattcactgtctcagctggctgttactctctcagaccatatggcaaagttttccaagaaaatgccccgacaggggtgcccagcacactgcctgagggacaacagacatcagaacaaacccccagagagaaacagtcaaaatcagggcccggtgcagtgttgtcatgtggaacctgctttatccattgctgagtgttgaatgtgggtaatggttagggctttccagatctcagcagccaaagacagttattgttggaagactgtcatgtagataaccatgagcaatggctcgcctcagaatcagttcataaaattctatggtactggccccttcgtgggtattgtgtgaaatgagatggtggcgaggggtgcgctgtggaactgccgcagccacgcaggaggtccctgggggatgctttgggaagtccttgcccctgagcactgcctgattgccagggcctgtggaggtctaggccgcctggcagaatctagcaccgtccgaatccccgcaggacccatggagctatgaccacaccaggccattcaaatggctctgcattatcttcccttggaaggtggccactcctcggtggcagggcctttccctgaggctgcaggccgtgggctggcagcccgtctcttggcatttcaattgaaggtcaccaggtgctgggtttgaaaggaagtcactggagtgctgccaggggccgccctccaaggttaatgagaggcccacatccaggcaagaactaattcaaaaggcagatcagaaaccacaggagtcaaaattattgctccggcagtgcttcccttcctttcatccactggcctcgtgtggtccatgcagggccactgtctgccctttctgatgccacgtattaggctttcttactcagaattttgatagaaaaccatggggccaagagctctggaagcctggccggaaagaccaaggttcatgcagcccaacaaatgattgttgagcacctctcggagccaaagtccttaggcgagtgtggtgacttcctggaaggaggatgcagacttccagagagcccccccaacggacgtgctgagaagggagagggaggcgggggctgtagtcaggaaggagccagagaagaacagggtttgggtgcatccagaaatatgcctgcagtaggagggagaggaaggggtgccaccgtcaacggcttcccatcggaggtggttggtgcagatggaagtttctgtctgctggccctcaagagagtgttttgccagggacacagtctgttcctcctcagaaaacaccccccaaatgctaacaacatccccaccagctgctagaagcccctttcccctccccaccttgaagtagctcatagttctctgggcagagccagaccatccagtgtaccccagaggccagtaggttcctgcccattttcctctctggcttcctgccaagaattatggcagctgaggatgaatggagaagtaaaaacaacacacaccacacacccc

SEQ ID NO: 169 - DNA, 2449 bp, Homo sapiens
  misc_feature: Incyte ID No: 335367.1
  unsure 36: a, t, c, g, or other
cgaaggagtcctttggggttggaggaggggcgcgangcgcggcaaatcgggcgggaagaggtaaaaaaggaactgggagcgcgccgcggcggttcctgtccttacagttgcgctgcccagggaccgatgttgcgcgaggaaaatgcgggacgcccaggtcggtgctcggcccagacttatgcccgtgttttcacagcccacactcgtgcccgaagccccttaccccgccccgggctgtggtctgtgggctgtgggacgagctgcggcgcgggccatttctgagcagtggaggtttcaagtaatccactaacaaccagttccaaattctgtcatcaaatcctgtgctgctgttcctcgtggtaatagatgcatattatttcttttatttaaaagaaatgaatgtgactagtattgcattaagagctgaaacttggcttttagctgcatggcatgttaaagtacctccgatgtggctggaagcttgtattaactggattcaagaagaaaataataatgttaacttgagtcaggcccaaatgaataaacaagtgtttgagcagtggctccttactgatctgagggatttggagcatcctcttttacccgatggcattttagaaattccaaaaggagaattaaatggattttatgctctgcagattaattccttggttgatgtaagtcagcctgcatactcccagatacagaagttgagaggaaagaatacaacaaatgatctagttacagctgaagcacaagtaaccccaaaaccttgggaagcaaagccttcacgaatgttgatgctgcagctaactgatggaatcgtacaaatacagggaatggaatatcagcctattccaattcttcatagtgatcttcctccaggtacaaaaattttgatttatggaaatatatctttccgtcttggtgttctcttattgaaaccagaaaacgtgaaagtgttaggaggtgaagtagatgctcttttagaagaatatgcccaagaaaaagtacttgcaagattaataggggaacctgatcttgtagtttcagtcataccaaacaattctaacgaaaacattcccagagttacagatgttctagatcctgcattaggtccttctgatgaagaactcttggcaagtcttgatgaaaatgatgagcttacagcaaataatgacacttcctcagaacgatgtttcaccacaggtagttcctcaaataccattcccacaagacagtcaagttttgagccagaatttgttatttctccaagaccaaaagaggaaccatcaaacctatctatacatgtaatggatggagaattagatgacttttcactggaggaggccttgcttttagaagaaactgtccagaaagaacagatggaaactaaggaattgcaaccattgacttttaacagaaatgccgatcgaagtatagagagattttcacataatcctaatactacgaataacttttctttgacttgcaaaaatggaaacaataattggagtgaaaaaaatgtatctgaacaaatgactaatgaagacaaatcatttggttgtccatctgttagagaccaaaacaggagtattttttcagttcattgtaatgtacccttagcccatgattttacaaataaagaaaagaacttagagacagataataaaataaaacaaaccagcagttcagatagccattccttaaataataaaatattaaatagagaggtggtcaactatgtacagaaaaggaattcacaaatttctaatgaaaatgattgtaatttacagagttgttctttaagatcatcagagaatagcattaatctttctattgccatggatttgtattctccaccctttgtctatttgtctgttctaatggccagcaaaccaaaggaagttacaacagtgaaagtgaaagcatttattgtaaccttaactggaaatctctcaagttctggtggtatttggagtataactgcaaaggtgtctgatggtactgcatatctagatgtagactttgtggatgaaatacttactagcttgatagggttctcagtaccagaaatgaaacagtcaaaaaaggatcctcttcaataccaaaagttcctggaagggttgcagaaatgtcaaagagatctaatagatttgtgctgtctaatgactatttcatttaatccttccttgtctaaagcaatggtactggcattacaagatgttaatatggaacaccttgagaatctaaagaagcggttaaataaataattaaactaaaatagtattaggaacaattaaaaacaacaaggaaatatttagaatttgttcacaattttacttatgatactttgtgtaaaaaggaaaaatgaaatttcatagcttatttcagtttaattttaaagtgtttaatcatgtttgttatatgtggagctttgaaaataagt

SEQ ID NO: 170 - DNA, 2600 bp, Homo sapiens
  misc_feature: Incyte ID No: 222821.1
gcggcggcggcgcgcggagacgcagcagcggcagcggcagcatgtcggccggcggagcgtcagtcccgccgcccccgaaccccgccgtgtccttcccgccgccccgggtcaccctgcccgccggccccgacatcctgcggacctactcgggcgccttcgtctgcctggagattgattttgcctaccattttacagtatttgtcttctattttggagcctttttattggaagcagcagccacatccctgcatgatttgcattgcaatacaaccataaccgggcagccactcctgagtgataaccagtataacataaacgtagcagcctcaatttttgcctttatgacgacagcttgttatggttgcagtttgggtctggctttacgaagatggcgaccgtaacactccttagaaactggcagtcgtatgttagtttcacttgtctactttatatgtctgatcaatttggataccattttgtccagatgcaaaaacattccaaaagtaatgtgtttagtagagagagactctaagctcaagttctggtttatttcatggatggaatgttaattttattatgatattaaagaaatggccttttattttacatctctcccctttttccctttccccctttattttcctccttttctttctgaaagtttccttttatgtccataaaatacaaatatattgttcataaaaaattagtatcccttttgtttggttgctgagtcacctgaaccttaattttaattggtaattacagcccctaaaaaaaacacatttcaaataggcttcccactaaactctatattttagtgtaaaccaggaattggcacactttttttagaatgggccagatggtaaatatttatgcttcacggtccatacagtctctgtcacaactattcagttctgctagtatagcgtgaaagcagctatacacaatacagaaatgaatgagtgtggttatgttctaataaaacttatttataaaaacaaggggaggctgggtttagcctgtgggccatagtttgtcaaccactggtgtaaaaccttagttatatatgatctgcattttcttgaactgatcattgaaaacttataaacctaacagaaaagccacataatatttagtgtcattatgcaataatcacattgcctttgtgttaatagtcaaatacttacctttggagaatacttacctttggaggaatgtataaaatttctcaggcagagtcctggatataggaaaaagtaatttatgaagtaaacttcagttgcttaatcaaactaatgatagtctaacaactgagcaagatcctcatctgagagtgcttaaaatgggatccccagagaccattaaccaatactggaactggtatctagctactgatgtcttactttgagtttatttatgcttcagaatacagttgtttgccctgtgcatgaatatacccatatttgtgtgtggatatgtgaagcttttccaaatagagctctcagaagaattaagtttttacttctaattattttgcattactttgagttaaatttgaatagagtattaaatataaagttgtagattcttatgtgtttttgtattagcccagacatctgtaatgtttttgcactggtgacagacaaaatctgttttaaaatcatatccagcacaaaaactatttctggctgaatagcacagaaaagtattttaacctacctgtagagatcctcgtcatggaaaggtgccaaactgttttgaatggaaggacaagtaagagtgaggccacagttcccaccacacgagggcttttgtattgttctactttttcagccctttactttctggctgaagcatccccttggagtgccatgtataagttgggctattagagttcatggaacatagaacaaccatgaatgagtggcatgatccgtgcttaatgatcaagtgttacttatctaataatcctctagaaagaaccctgttagatcttggtttgtgataaaaatataaagacagaagacatgaggaaaaacaaaaggtttgaggaaatcaggcatatgactttatacttaacatcagatcttttctataatatcctactactttggttttcctagctccataccacacacctaaacctgtattatgaattacatattacaaagtcataaatgtgccatatggatatacagtacattctagttggaatcgtttactctgctagaatttaggtgtgagattttttgtttcccaggtatagcaggcttatgtttggtggcattaaattggtttctttaaaatgctttggtggcacttttgtaaacagattgcttctagattgttacaaaccaagcctaagacacatctgtgaatacttagatttgtagcttaatcacattctagacttgtgagttgaatgacaaagcagttgaacaaaaattatggcatttaagaatttaacatgtcttagctgtaaaaatgagaaagtgttggttggttttaaaatctggtaactccatgatgaaaagaaatttattttatacgtgttatgtctctaataaagtattcatttgataaaaaaaaaaaaaagg

SEQ ID NO: 171 - DNA, 1527 bp, Homo sapiens
  misc_feature: Incyte ID No: 349615.7
gcaggggttcgtttgtgatatggtagtacgatgcctgtaattttgatattttaaattattttatatcaaaataatttcttttaaaatttatttttaaaatgactgcctttaaaaatattcatgctcctaccctcacccccttgcaggaacttgcatcaacaatacttcagtcatgatgtttaaaaaggggagctttgaaattggaggaaccatacatccagttgcaattaagtataaccctcagttcggtgatgcattttggaacagtagtaaatacaacatggtgagctacctgcttcgaatgatgaccagctgggccatcgtctgtgacgtgtggtacatgccccccatgaccagagaggaaggagaagatgcagtccagtttgctaacagggttaagtctgctattgctatacaaggaggcctgactgaacttccctgggatggaggactaaagagagcaaaggtgaaggacatctttaaggaagagcagcagaaaaattacagcaagatgattgtgggcaatggatctctcagctaagaggacggatgacagcctttagatctagaactagcccttagaaatggaatggcttttttgttttgttttgttttattgttttgtttttattattgttaatcttttctacagaatgattgtctctacctctttatgccagaggcagaacctacaggtgccctttttggcttttgttgttgttgtaacattagccccatggattgtaaggtggtttactgagttaaaacagattctgcttttgtaaaatgatggcatcactgtggactgaatgaaatatttgtatagaaaaaagtgcttgaaaagtgtgtttggaactcatcgatagggtaattctccaaaaatgcccaaactctctttctgtaattagccttgccactttcttcagtcacttaaatggtgagattacacatcagtgcaagatgaccattatggttatggtctactgcaaggttgaaaggaaaaatggaggattgtatttaggaaaagggacaactttgtggccacctgctctgaaagtcaaaaggaaatgtaaattagtgtcattagtgtgttggaagagaaatactattcagtaagcttcgccaaagaaaagtgagtcaaagttaatgtgtgtgtgcatttatatgtaggcagctcgtagaccacattttagccagcaactggtaacaaagagcttagttttccttgtttgaatgctgtagatctgtacctagtacccctcccatctactgatttgtttgtttttgtaaccaaacacattttcagatagaaggagccttaaaaaaaaaaaaatcacattgagtaacttcagtatgaatgaatgagagtgtgtggagctacccctcaccctccacccctttgggctttttattcccgaattttcccagtctcttaaacagaaaaatgactgatataattatcttttggaaactgagccttaattttttttagagggggaaataagtttccccaactcacacagcata

SEQ ID NO: 172 - DNA, 590 bp, Homo sapiens
  misc_feature: Incyte ID No: 245452.1
attttgttttccaccatgcctgaaccagtcaaatctgctccagtccctaaaaaaggctccaagaaggccattaacaaggctcagaagaaggatggaaagaagcgcaaacgcagccgcaaggagagctactctgtgtatgtgtacaaggtgctgaagcaggtccaccccgacaccggcatctcttccaaggctatgggaatcatgaactccttcgtcaacgacatctttgagcgtatcgccggagaagcgtcacgcctggcgcattacaacaagcgctcgaccatcacttcgagggagatccagacggccgtgcgcctactgctacccggggaattggccaagcacgccgtgtccgagggcaccaaggccgtcaccaagtataccagctccaagtgagcctctcgctgcagtaacagttccgccgtgacccacaccccaaaggctcttttcagagccgtccacgtttctcaagaaagagccagttcactgttaagtttgtctcccattaggtaccctttgggactcgcttcgtacatataaatgtacttgtatatgtgggtttttttttgttttttgttgttgtttttgag

SEQ ID NO: 173 - DNA, 652 bp, Homo sapiens
  misc_feature: Incyte ID No: 346917.1
  unsure 510: a, t, c, g, or other
gctccatactgggagaggcttctgggtcaaaggaccagtctgcagagggatcctgtggctggaagcgaggaggctccacacggccgttgcagctaccgcagccaggatctgggcatccaggcacggccatgacccctccgaggctcttctggatgtggctgctggttgcaggaacccaaggtgagctgagcccctgggaaataccaaaagcagaagtgtggaaggctggtgcaccctggggctgctcagagcttcaaggagatattctgcctggggcccggggcccagcggttagccagatcttctctcctgcttgaagcaccaggtatccccagtgatgatgacttggaggttcccgggggctcacctgggttcaggtgagatgcaggttatagagaggacactagggaatcctccattccgtccagagggaaccagaggggctgatcaaaccagcagtcacaggggccgttgtgaggtcagtggccttggacgcaggtcagtcttccngagggtcctggctgcttttcctcacattctttacactgtgagcccctggaagctcatgctcatcctgggggccccatggaagccagatgtacccccgactggattcaggcacccagctcctgcccggctctgtcagctcctg

SEQ ID NO: 174 - DNA, 1827 bp, Homo sapiens
  misc_feature: Incyte ID No: 001929.1
ccttgacaatctgtctgtccgtctgcagctgcgtgactgtctgtctctgccatgtctctctccccatgccgggcccagaggggcttcagcgctcgctcagcctgttctgctcgctcaaggggccgcagcaggggaggcttcagcagcaggggcggcttcagcagcaggagccttaattcctttggggggtgcctggaaggctctcgtgggagtacctgggggtcagggggtaggctgggggtgcggtttggggagtggagtggtgggcctgggctctccctgtgccctccggggggcatccaagaagtgaccatcaaccagaatccgctgaccccactgaagattgagatcgatccccagttccaggtggtgcggacgcaggagacccaggagatcagaaccctcaacaaccagtttgcttccttcattgacaaggtgcggttcctggagcagcagaacaaggtcctggagacgaagtggcatctgctgcagcaacaggggttgagtggcagccagcagggcctggagcctgtctttgaggcctgcctggatcagctcaggaagcagctggagcagctccagggagaacgaggggctctggatgctgagttgaaggcctgccgggaccaggaggaggagtataagtccaagtatgaggaggaggcccacaggcgtgccacacttgagaacgactttgtggtcctcaagaaggatgtggatggggttttcctgagcaagatggagttggagggcaagctggaggctctgagagagtacctctacttcttgaagcatctgaatgaagaagagctgggccagctccagacccaggccagcgacacgtctgtggtgctgtccatggacaacaaccgctacctggacttcagcagcatcatcactgaggtccgcgcccggtacgaggagatcgcccggagcagcaaggctgaggctgaggccttgtaccagaccaagtaccaggaacttcaggtgtctgcccagcttcatggggacaggatgcaggaaacgaaagtccagatctctcagctacaccaagagattcagaggctgcagagtcagactgagaacctcaagaagcagaacgccagcctgcaggccgccatcactgatgctgagcagcgtggggagctggccctcaaggacgctcaggccaaggtggacgagctggaggctgctctgaggatggccaagcagaacctggcccggctgctgtgcgagtaccaggagctgacgagcacgaagctttccctggatgtggagattgccacttaccgcaggctgctggagggcgaggagtgcaggatgtctggggagtgcaccagccaggtcactatctcctcggtgggaggcagcgctgtcatgtctggaggagttggtggaggcttggggagcacttgtggactcggtagtgggaaaggcagccctgggtcctgctgcaccagcattgtgactggaggctccaacatcattctgggctctgggaaggaccctgttttggattcctgctctgtgtctggctccagcgctggctccagctgccacaccatcctgaagaagacagttgagtcgagtctgaagacatccatcacctactgagcgacccagcagccacctccttcctgaacacatttggcccactccccccatcagccggctctgcaaggccaactccgtgtccgctgcccacagcccaagccagcccacagcggatgctgcaaaaatcaataaagtctcccctcctgctgttctgaatgctctaagtgcttgcacacctcacccagcaaaacaaaagctgtgtgactccccagc

SEQ ID NO: 175 - DNA, 3655 bp, Homo sapiens
  misc_feature: Incyte ID No: 344785.5
  unsure 3631, 3637, 3640: a, t, c, g, or other
agcggccggggccacgatggagcgcgacggctgcgcggggggcgggagccgcggcggcgagggcgggcgcgctccccgggagggcccggcggggaacggccgcgatcggggccgcagccacgctgccgaggcgcccggggacccgcaggcggccgcgtccttgctggcccctatggacgtgggggaggagccgctggagaaggcggcgcgcgcccgcactgccaaggaccccaacacctataaagtactctcgctggtattgtcagtatgtgtgttaacaacaatacttggttgtatatttgggttgaaaccaagctgtgccaaagaagttaaaagttgcaaaggtcgctgtttcgagagaacatttgggaactgtcgctgtgatgctgcctgtgttgagcttggaaactgctgtttagattaccaggagacgtgcatagaaccagaacatatatggacttgcaacaaattcaggtgtggtgagaaaaggttgaccagaagcctctgtgcctgttcagatgactgcaaggacaagggcgactgctgcatcaactacagttctgtgtgtcaaggtgagaaaagttgggtagaagaaccatgtgagagcattaatgagccacagtgcccagcagggtttgaaacgcctcctaccctcttattttctttggatggattcagggcagaatatttacacacttggggtggacttcttcctgttattagcaaactaaaaaaatgtggaacatatactaaaaacatgagaccggtatatccaacaaaaactttccccaatcactacagcattgtcaccggattgtatccagaatctcatggcataatcgacaataaaatgtatgatcccaaaatgaatgcttccttttcacttaaaagtaaagagaaatttaatcctgagtggtacaaaggagaaccaatttgggtcacagctaagtatcaaggcctcaagtctggcacatttttctggccaggatcagatgtggaaattaacggaattttcccagacatctataaaatgtataatggttcagtaccatttgaagaaaggattttagctgttcttcagtggctacagcttcctaaagatgaaagaccacacttttacactctgtatttagaagaaccagattcttcaggtcattcatatggaccagtcagcagtgaagtcatcaaagccttgcagagggttgatggtatggttggtatgctgatggatggtctgaaagagctgaacttgcacagatgcctgaacctcatccttatttcagatcatggcatggaacaaggcagttgtaagaaatacatatatctgaataaatatttgggggatgttaaaaatattaaagttatctatggacctgcagctcgattgagaccctctgatgtcccagataaatactattcatttaactatgaaggcattgcccgaaatctttcttgccgggaaccaaaccagcacttcaaaccttacctgaaacatttcttacctaagcgtttgcactttgctaagagtgatagaattgagcccttgacattctatttggaccctcagtggcaacttgcattgaatccctcagaaaggaaatattgtggaagtggatttcatggctctgacaatgtattttcaaatatgcaagccctctttgttggctatggacctggattcaagcatggcattgaggctgacacctttgaaaacattgaagtctataacttaatgtgtgatttactgaatttgacaccggctcctaataacggaactcatggaagtcttaaccaccttctaaagaatcctgtttatacgccaaagcatcccaaagaagtgcaccccctggtacagtgccccttcacaagaaaccccagagataaccttggctgctcatgtaacccttcgattttgccgattgaggattttcaaacacagttcaatctgactgtggcagaagagaagattattaagcatgaaactttaccctatggaagacctagagttctccagaaggaaaacaccatctgtcttctttcccagcaccagtttatgagtggatacagccaagacatcttaatgcccctttggacatcctataccgtggacagaaatgacagtttctctacggaagacttctccaactgtctgtaccaggactttagaattcctcttagtcctgtccataaatgttcattttataaaaataacaccaaagtgagttacgggttcctctccccaccacaactaaataaaaattcaagtggaatatattctgaagctttgcttactacaaatatagtgccaatgtaccagagttttcaagttatatggcgctactttcatgacaccctactgcgaaagtatgctgaagaaagaaatggtgtcaatgtcgtcagtggtcctgtgtttgactttgattatgatggacgttgagattccttagagaatctgaggcaaaaaagaagagtcatccgtaaccaagaaattttgattccaactcacttctttattgtgctaacaagctgtaaagatacatctcagacgcctttgcactgtgaaaacctagacaccttagctttcattttgcctcacaggactgataacagcgagagctgtgtgcatgggaagcatgactcctcatgggttgaagaattgttaatgttacacagagcacggatcacagatgttgagcacatcactggactcagcttctatcaacaaagaaaagagccagtttcagacattttaaagttgaaaacacatttgccaacctttagccaagaagactgatatgttttttatccccaaacaccatgaatctttttgagagaaccttatattttatatagtcctctagctacactattgcattgttcagaaactgtcgaccagagttagaacggagccctcggtgatgcggacatctcagggaaacttgcgtactcagcacagcagtggagagtgttcctgttgaatcttgcacatatttgaatgtgtaagcattgtatacattgatcaagttcgggggaataaagacagaccacacctaaaactgcctttctgcttctcttaaaggagaagtagctgtgaacattgtctggataccagatatttgaatctttcttactattggtaataaaccttgatggcattgggcaaacagtagacttatagtagggttggggtagcccatgttatgtgactatctttatgagaattttaaagtggttctggatatcttttaacttggagtttcatttcttttcattgtaatcaaaaaaaaaattaacagaagccaaaatacttctgagaccttgtttcaatctttgctgtatatcccctcaaaatccaagttattaatcttatgtgttttctttttaattttttgattggatttctttagatttaatggttcaaatgagttcaactttgagggacgatctttgaatatacttacctattataaaatcttactttgtatttgtatttaaaaaagaaaaatattcctatcctgctcactggtaattaacataggtttaaaatggcttcaaatgtggccctatagacggttaaaattgtaccttatcttggcaaaacttcagagcaccagtacagtgcatgcaaggngccatnttntattgagatgctaga

SEQ ID NO: 176 - DNA, 678 bp, Homo sapiens
  misc_feature: Incyte ID No: 201204.9
gttaaaattctggctctgtcatctactaaacttgaatgtgacctttggcaacctattgaacttccttctgattgattcctcatctatccaatggataatacagatgctccctgatttaagtcccagtaaacccactgtaaaggtaaaaaatggttacatcagcgagtgtctataatttgcctctcaaggaacttttgtatggactatgatcattcaactctgagtctggagcatgtggcagggtgcctaacactagaatgggctcagttctgatttaagtagccttggctatatgtcatgcccacaccagctcctctccacaggtgtgctccatcctctggtctccccattacaaggagctcatctcaggccatggctttgcacagaaccagctagttatttggaagtacccaaccatggccaaggtggctgaactcaaaggtcacacatcccgggtcctgagtctgaccatgagcccagatggggccacagtggcatccgcagcagcagatgagaccctgaggctatggcgctgttttgagttggaccctgcgcggcggcgggagcgggagaaggccagtgcagccaaaagcagcctcatccaccaaggcatccgctgaagaccaacccatcacctcagttgttttttatttttctaataaagtcatgtctcccttc

SEQ ID NO: 177 - DNA, 3027 bp, Homo sapiens
  misc_feature: Incyte ID No: 413720.1
  unsure 2886, 2952, 2990, 3001: a, t, c, g, or other
aactggacaagcacctgtaccctaatcttcctaagccccaaaattgacattgcccctggaaaccaaaccttaccagtccctgtcagagcccaagtccatcagcatagggctgtgcagataatacccttgcttataggactaggagttaccaatgccacaggaactggaatagcaggtttgtccccttccctgtcctactatcatacactcttaaaggatctctcagacagcctacaagacatagcaaaatccacccttactctccaatcccaaatagactccttagcagcagtaactctgcagaaccaccgtggcttagacctcctaaccgtcgaaaaaggtgggctatgcacctttttaggggaagattgtttttccaccaaccagtctggactagtacgagatgctgcctcgcagttaaatgaaaaggcttctaaaatcagacaatgtctttcagacttttaacaccaatctttggagctgggcgttgtggcttctccctatagctgggcccctcatttccatcattctccttctcctatttggaccctgcctcttccgtctagcctctcagttcctacaaaatctcattcaagctattaccaatcaatctatgcgacaaatgctactcctaactgcccctcaatgtcacccccaccccaagatctctctcccaattaggagtccatgccgccccaagtcccgctcgaagaatccctgagaaacatcaccccgtccacttcttttcttattaaaacaaaaagacaggaatgtcatatcccacaaatatggctgcattattgccagcaggccattattgacggtgggccattaagaactctgtgaccggcacatatgcctccagacttcctggaaccagaaaacctgcaacaaccaaaaaccacaaaagaagaacaacgggtttctgttccaactggttgatcaacttcttgagtcaacaagtcccaaaaccatgttgtaattttccacccgccactttgctctgtaaagactgctctccctcacacctccgggctgactcccttttccgattcagcccactaacacccaagtgaataaacggccttgttgctcacacaaagtctgcttgggtcttcaatccagaccacgctgtaacacacacttacaaaattctgctgagaatatgccccccgttattcataatgctcatgtttttcatactgagggtagctgtgcactttgggtttttacagagaaatgtgttttaggggaagtttttctggctgacttgttcaatcatatctaatctgagtttttttcttaagatgcttttctttttttttccctctcaatataatcattttcagagtgagctgtttttctcttgaatgcattgggtgtctgttttggaagccctattactatcccatggtgtctgttaatgaggtgggctgtcatagtgagaactcttggagctatctctatatggactcatgctggaaatccagcagagtgatttccatgtcaccattacaaataaaaaactgaggcttaaacactgcacccattcccattattgtgaaggtgcaattctacccaggaggcctgcaggctctcctcctgcaactcaggcttcattctctgatgtggcattgaagtgctgctgtggcagttggggttatatatagggtgccaggtgtgagctgtgtgctgggggctctgcctcagtggcagatggtaggagtcaagagaggacacaagctaccaggagacggcaagcaggaggcacctggctttaagttgcaaaattaccttttgtcatgaagatgtgaaaagtgtattttgtcattgattataaccaattagcatatatggatgacctcccaaattaccaggtgaatttatgatgaactatgtatgacatgtgctgtaaatttttctacttgtggactaattattgtgaccgtctttctgtctttgcaatctcttaagcagattgactgtgatgcatgtcacattcaagtttaattgtgtaataaaaccattttctttctgttctgttattgtggagttctctggggctggagaaaatttttcttttaattattgtttccaaacagtctagaattaccagacatgatataaacacataagggccaaccagaatttactcgaggggacattccctctcaggcttccagtaaattcacacttgtgcagaaaagtgcatgccataccctaaatgtgcaggccgaattgtgtttctgcctatttcttatctatagtcctctacagtcacttctagagagtctagatcagatttctataaatttcacagggcagcaatcaatcattttacctctttcagtgactcttttatcttcaaacctgaaactgattcagagaccatggggccaacaaacccaagtagagtaacgtgtgtagtgagtagacatgtagacaagaaaatctccatttctttcttccttctcttgctaaaaagctcacaaatgtgcagataacatgcgtgctactccagccactcaagccctaaatctgcagctccatattttgaatccaggtcttgagatttgggaattaaaaaacttttatctgaaaaatgcaagtccttttagttatcaaactcagagacgttaaaataaaagtgcaattatgtctttctcctccctttgaattctgtattcatcttttgagactgttcactattgccacatgtagctataaattaaactaataatgctacattggacactatattttataccctaaaccattatgatatatatctaattaataatcaatgctatttctgtaaataaaaatttctgaaaaacaactttgtgtcagcccactctctgtccctctgttgttgtctttacaaancctcttgtaaatgctgctaattaaagtgtagattccaggcaacttgaatctttgctcccaggttangatcctttaaacttgaccccaataaactgtctacttangttccagttgngtcagccttttttaatatatatatag

SEQ ID NO: 178 - DNA, 1503 bp, Homo sapiens
  misc_feature: Incyte ID No: 217973.1
cgggcctaccgctgctgccgctgtcgaagagcggcagagaaagcttcaggagtaccttgcagccaagggaaaactgaagagccaaaacaccaagccttatctaaaatccaagaataattgccagaatcaaccaccttctaaatctactattagacccaaaaatgatgttaccaaccatgttgttttgcctgtcaaacctaaaaggtccatcagcattaaactccagcccagaccacctaatactgcagggtcccagaagccgaagttggagccaccaaaacttctgggcaaaaggctgacttcagaatgtgtttcttctaacccatactctaagccttctagcaagagttttcaacagtgtgaagctggatcgtccacaacaggagaactgtcaagaaaacctgtggggtcacttaatatagagcaattgaaaactacaaagcagcagttaacagatcaaggcaaatggtaaatgtatagactttatgaataatatccatgttgaaaacgaatctttggataactttctaaaagaaacaaacaaagagaacttgctcgatatcttaacagaacctgagaggaagccagatcctagattatataccagaagtaagccaaagactgactcttataatcaaaccaagaacagtttagttcctaaacaagccttgggcaaaagttcagttaatagtgctgttctgaaagatagggttaataaacaatttgttggagaaacacaaagcaggactttcccagtaaaatcacagcaactctctagaggagcagatcttgcaagaccaggagtaaaaccctcaaggacggttccctctcactttattcggacccttagtaaagttcagtcatcaaagaaaccagtagtcaagaacatcaaagatataaaggttaataggagtcaatatgaaagaccaaatgaaactaagatacggtcataccctgttactgaacagagagtgaagcacaccaaacccagaacataccccagtttgcttcagggtgaatataacaacagacatccaaacatcaagcaagatcagaagtccagccaagtttgtatacctcagacatcatgtgtactgcaaaagtcaaaagccgtaagccagaggcctaatttgacagttggcagatttaattcagccattccaagcacccctagcataagaccaaatggaaccagtggtaataaacataacaataatggctttcagcaaaaagcacagactttggactccaagttgaaaaaggctgttccccagaaccattttctgaacaagacagctcccaaaactcaagctgatgtcacaaccgtaaatgggacccaaacaaacccaaatattaaaaagaaggcaacagcagaggatcgaaggaaacaactagaagaatggcagaaatctaagggaaaaacctataaacggcctcctatggaacttaaaacaaaaagaaaagtaataaaggaaatgaatatttcattctggaagagcattg

SEQ ID NO: 179 - DNA, 1948 bp, Homo sapiens
  misc_feature: Incyte ID No: 337250.1
cgacagtggtaattacgtagccagtatgtcaactcctagaagcacagttggtgttgttgcattaaacaacaaattatatgctattggtggacgtgatggaagttcctgcctcaaatcaatggaatactttgacccacacactaacaagtggagtttgtgtgctccaatgtccaaaagacgtggaggtgtgggagttgccacatacaatggattcttatatgttgtatggggggcatgatgccctggcttccaaccattgctccaggctttctgactgtgtggaacggtatgatccaaaaggtgattcatggtcaactgtggcacctctgagtgtacctacgagatgctgttgctgtgtgccctctatggagacaaactctacgtggttggaggatatagacggacatacttatttagaacacagtatgagtacatatagatagcacagagaaatagaatggaaagaggaagttcctgttaacattggaagagctggtgcatgtgttgtagtggtgaagctaccctaaagctatctatctttatcaaatggaatgaaactagataatttcaagaaactgagtaggacaaagggagaaagaaatacatgttctttttcctgcaattaataatcagactggaaaattgttgtatcattttaatttgtagttacaattgctttcattcgtgaagccgaaacgtttttaaacatgaattacatatgaattattaagcatatgtgctttcgcagctgataatataaaaggaaatcccacagtctagatatagccccattactacaaaatgctaaaatatttaatgaaaattgatggtggccacagtgtgcaggttataaaagcattaatacatttcaaggtaagagccttaaaagttaaaaacattttcagtttttttttaaaaaacgtactcttattatctggaacatagaaatataaaaggtaacatctaaagcttagaatagtgtgatttttagtaagccattattctcctattcaaataatatccccaaagagctagacaattccttacatttaccaagaggaaagcttttactgtgttgaagctaaaaaaaataatggctctttgacaaaacttgttatgttgatcgcggtatgtcaaaatttttacaggtttgctcatctgccagagcacacatataaatttgggtatttcttaacatattatcttggttagatttggttaccagtaaaatattactgtaatttcatatacacagtctatacaatgaaataatgaatatttatcatattgatacaaactgtgacctcagcttcagagtgtcagggcctcacttgtatagaatgtaatgttctcctcaaacatttatgttaactctataaacaaatatcgttaagttaaacaagttttcaaaaacaaaacaatttttaaagtaccttaaaattgaggatgttactcagtgttaacacatgggaacaccaaaatattcaataagcctggtcaattctatagttatcttttttgtaccaaccacatgcttttctgttactgttatattatccagtagaaaatggttagggatatgtgtgctatataaaaaaaaaaaaagacttgattaagttattaaaataacaaaaaatggctagttgaaatagtattttatgtgtaaattcttccatttattctggtttaattatacaaactaagatgaaatattgaaaaaccctttagtgaaagtaacttttcaagtaaatgacaaacttaagaatttcctacaaataagttctatttaaacagtctttttattgtggattgtgaaaatcaaaatactggagaaatgcatataaaatatactactagcttttaagttttaagaaagaagaacgtaagttgtacaaagatatttgtactttgacaaactgaatttaaataaactttatttcctctcaaa

SEQ ID NO: 180 - DNA, 4712 bp, Homo sapiens
  misc_feature: Incyte ID No: 347699.11
  unsure 3238-3553: a, t, c, g, or other
ctgggcagagccggtggcaagggcctcccctgccgctgtgccaggcaggcagtgccaaatccggggagcctggagctggggggagggccggggacagcccggccctgccccgtcgccccgctgggagcccagcaacttctgaggaaagtttggcacccatggcgtggcggtgccccaggatgggcagggtcccgctggcctggtgcttggcgctgtgcggctgggcgtgcatggcccccaggggcacgcaggctgaagaaagtcccttcgtgggcaacccagggaatatcacaggtgcccggggactcacgggcacccttcggtgtcagctccaggttcagggagagccccccgaggtacattggcttcgggatggacagatcctggagctcgcggacagcacccagacccaggtgcccctgggtgaggatgaacaggatgactggatagtggtcagccagctcagaatcacctccctgcagctttccgacacgggacagtaccagtgtttggtgtttctgggacatcagaccttcgtgtcccagcctggctatgttgggctggagggcttgccttacttcctggaggagcccgaagacaggactgtggccgccaacacccccttcaacctgagctgccaagctcagggacccccagagcccgtggacctactctggctccaggatgctgtccccctggccacggctccaggtcacggcccccagcgcagcctgcatgttccagggctgaacaagacatcctctttctcctgcgaagcccataacgccaagggggtcaccacatcccgcacagccaccatcacagtgctcccccagcagccccgtaacctccacctggtctcccgccaacccacggagctggaggtggcttggactccaggcctgagcggcatctaccccctgacccactgcaccctgcaggctgtgctgtcagacgatgggatgggcatccaggcgggagaaccagaccccccagaggagcccctcacctcgcaagcatccgtgcccccccatcagcttcggctaggcagcctccatcctcacaccccttatcacatccgcgtggcatgcaccagcagccagggcccctcatcctggacccactggcttcctgtggagacgccggagggagtgcccctgggcccccctgagaacattagtgctacgcggaatgggagccaggccttcgtgcattggcaagagccccgggcgcccctgcagggtaccctgttagggtaccggctggcgtatcaaggccaggacaccccagaggtgctaatggacatagggctaaggcaagaggtgaccctggagctgcagggggacgggtctgtgtccaatctgacagtgtgtgtggcagcctacactgctgctggggatggaccctggagcctcccagtacccctggaggcctggcgcccagggcaagcacagccagtccaccagctggtgaaggaaccttcaactcctgccttctcgtggccctggtggtatgtactgctaggagcagtcgtggccgctgcctgtgtcctcatcttggctctcttccttgtccaccggcgaaagaaggagacccgttatggagaagtgtttgaaccaacagtggaaagaggtgaactggtagtcaggtaccgcgtgcgcaagtcctacagtcgtcggaccactgaagctaccttgaacagcctgggcatcagtgaagagctgaaggagaagctgcgggatgtgatggtggaccggcacaaggtggccctggggaagactctgggagagggagagtttggagctgtgatggaaggccagctcaaccaggacgactccatcctcaaggtggctgtgaagacgatgaagattgccatctgcacgaggtcagagctggaggatttcctgagtgaagcggtctgcatgaaggaatttgaccatcccaacgtcatgaggctcatcggtgtctgtttccagggttctgaacgagagagcttcccagcacctgtggtcatcttacctttcatgaaacatggagacctacacagcttcctcctctattcccggctcggggaccagccagtgtacctgcccactcagatgctagtgaagttcatggcagacatcgccagtggcatggagtatctgagtaccaagagattcatacaccgggacctggcggccaggaactgcatgctgaatgagaacatgtccgtgtgtgtggcggacttcgggctctccaagaagatctacaatggggactactaccgccagggacgtatcgccaagatgccagtcaagtggattgccattgagagtctagctgaccgtgtctacaccagcaagagcgatgtgtggtccttcggggtgacaatgtgggagattgccacaagaggccaaaccccatatccgggcgtggagaacagcgagatttatgactatctgcgccagggaaatcgcctgaagcagcctgcggactgtctggatggactgtatgccttgatgtcgcggtgctgggagctaaatccccaggaccggccaagttttacagagctgcgggaagatttggagaacacactgaaggccttgcctcctgcccaggagcctgacgaaatcctctatgtcaacatggatgagggtggaggttatcctgaaccccctggagctgcaggaggagctgaccccccaacccagccagaccctaaggattcctgtagctgcctcactgcggctgaggtccatcctgctggacgctatgtcctctgcccttccacaacccctagccccgctcagcctgctgataggggctccccagcagccccagggcaggaggatggtgcctgagacaaccctccacctggtactccctctcaggatccaagctaagcactgccactggggaaaactccaccttcccactttcccaccccacgccttatccccacttgcagccctgtcttcctacctatcccacctccatcccagacaggtccctccccttctctgtgcagtagcatcaccttgaaagcagtagcatcaccatctgtaaaaggaaggggttggattgcaatatctgaagccctcccaggtgttaacattccaagactctagagtccaaggtttaaagagtctagattcaaaggttctaggtttcaaagatgctgtgagtctttggttctaaggacctgaaattccaaagtctctaattctattaaagtgctaaggttctaaggcctacnnnnnnnnnnnnnnnnnnnnnnnnnnnnnnnnnnnnnnnnnnnnnnnnnnnnnnnnnnnnnnnnnnnnnnnnnnnnnnnnnnnnnnnnnnnnnnnnnnnnnnnnnnnnnnnnnnnnnnnnnnnnnnnnnnnnnnnnnnnnnnnnnnnnnnnnnnnnnnnnnnnnnnnnnnnnnnnnnnnnnnnnnnnnnnnnnnnnnnnnnnnnnnnnnnnnnnnnnnnnnnnnnnnnnnnnnnnnnnnnnnnnnnnnnnnnnnnnnnnnnnnnnnnnnnnnnnnnnnnnnnnnnnnnnnnnnnnnnnnnnnnnnnnnnnnnnnnnttaagacctactgttctaaagctctgacattatgtggttttagattttctggttctaacatttttgataaagcctcaaggttttaggttctaaagttctaagattctgattttaggagctaaggctctatgagtctagatgtttattcttctagagttcagagtccttaaaatgtaagattatagattctaaagattctatagttctagacatggaggttctaaggcctaggattctaaaatgtgatgttctaaggctctgagagtctagattctctggctgtaaggctctagatcataaggcttcaaaatgttatcttctcaagttctaagattctaatgatgatcaattatagtttctgaggctttatgataatagattctcttgtataagatcctagatcctaagggtcgaaagctctagaatctgcaattcaaaagttccaagagtctaaagatggagtttctaaggtccggtgttctaagatgtgatattctaagacttactctaagatcttagattctctgtgtctaagattctagatcagatgctccaagattctagatgattaaataagattctaacggtctgttctgtttcaaggcactctagattccattggtccaagattccggatcctaagcatctaagttataagactctcacactcagttgtgactaactagacaccaaagttctaataatttctaatgttggacacctttaggttctttgctgcattctgcctctctaggaccatggttaagagtccaagaatccacatttctaaaatcttatagttctaggcactgtagttctaagactcaaatgttctaagtttctaagattctaaaggtccacaggtctagactattaggtgcaatttcaaggttctaaccctatactgtagtattctttggggtgcccctctccttcttagctatcattgcttcctcctccccaactgtgggggtgtgcccccttcaagcctgtgcaatgcattagggatgcctcctttcccgcaggggatggacgatctcccacctttcgggccatgttgcccccgtgagccaatccctcaccttctgagtacagagtgtggactctggtgcctccagaggggctcaggtcacataaaactttgtatatcaacgaaaaa

SEQ ID NO: 181 - DNA, 3067 bp, Homo sapiens
  misc_feature: Incyte ID No: 333919.1
  unsure 887: a, t, c, g, or other
ccggcccgggcgacagcgtgaacgcaagcggggccgcaaggagcagctgtggggaagcaggcggaggccccgggcctgcaggccggcaggaggacggccaaaaacgagacctgaggctgaagcccaacagaagatgaaacttgggagcagcctcagcttcgggaatcctcacttcctggcacagcaggtttgggtgccacagagcccagggctagacacctgccagcagtccatcagtcacagtctcagatgagtggcatcaaggtggagcccactgaggtgaaggaaggagctgtgagggacacctgcatcctgctgcagaaatgtctgccccccgccttgtcccaccgcagctccatctcacagttgaagaagcagaagcaaagcaacctgtcctggaccatgcagcctggtcctctgtttccagagccagaggtctttgtgctctgaaacaaagacagtgaccccattaacccactggcacttactgtgtgccaggcactcagcctgtgttgtctcattgcagcacagagcagccctgggaatggaagcagtgtcatcattcccatttttcaggtgaggcacaggctcagaaaggtcaagaaacttgctcacggtctcacagctggtgagtaggttgtcagactccaaagatgtgtgctgctaaccctgcccaaagggacttcatcctcctccctccttcccaggcagttctcccaaccacccaccaacaggcaacgtaggtgtgattgccttcaaagttttctacttgccttcaagcttgaagcactggagactgagggaagagagcactggaagtggaggaagaaaaaagagctgttccctccaaggttgttcccttgggcctgactcgactggaagaagcngggtgtatatgtgtgtgtgtgtgtaattgactttgtgaccatgaaactgagttaatactcttctgtctttgcctgtttcttcttgtacatcacctagaggaatacccattaatgtttagaggcagagaacaatagaaaatagcactgttcaaggaccaaaaatttaaaaagactgctgacatacagcatagaatgtgaaagtccctgataatcttatccctagggataaccacttgccatttttttacaatttcaattttttatgattataaaagtcatacacatttaaaaatacttcaaaataaatacaaaataaaaataaatgcttcattgcttaggttaccttggtacatgcaaggtctgagaccacatccatcaatgcagtttgctgcgtggattaccagatctctccaacattgacctcaattttttactctgagagcaaacagaatgggcaagggctgacctgaaatccttttgaaacacaagctggatcctagggctttgacctccactgctcactgccacatgggatccgtctctgtgccccactctgccccagccccactggccttcctgctgctgctcacacaggcctactcttaaggcctttgcatactctgttccctgcagaggcctctgcctctgaacaaatgtgggacccatctctgccaaggctgggaagcaaacagcccccactttgccttgtcagcctgtgtttgcaccattcctgtggtggcctctcccagctgctttcacgtgggatttgagctctgggaagctggaagtttgtggagtccacttccctcattttgcatatatggatgataaagcccacaggcaagggctctgacaaaaggaaagattccttccatttggcattgtgatgcagaggctgtcacagacaagcctgggaatttgggatacatcttgctgagcctagagacagaaaagagcttctaggctgccttccctgagccccgggccaggcccctccaggacacacttgcatggcaccctgttctttaaaacactgcacaccaacgactatgcaaaggattaactgacttctcaatattcttgttttctaccgagtgataagcttcagaaggacaaggtatgagtccgttttgctcttttgccttccccagcacatggcacaatgcccagcacatagtgttttgagagacagctgactggctgtctcatacaaggccctgctctgttgggcacaagggctgcttaacacattcctatgctacaaaagacagtgctcctctccaggaaccaccaataaattcagatactaatgccaaaaagaaggcagcatcagcttgggaaaagagtgcctttaaggcactgtttctctctatgaaggcagtgtggaatgatagggatgatctaggacctagaggagagaccttaagtcttacttgcagccaaaagccttcaaacctgagctagccagaactgttacatcagaattctcacccatgacaagaagcctggagggagtccagggttgatggattgacttaaggtgtcatcaaaagcttagactttacccttctgctgcaccacccttattgccttgttgtcacaagaggactactgctgttcaagtcatcacttccacattccagaaggaagaaaggagaggtagagggccagaagtatcccctccttttatcaggagccattaactttcccagaaacttccatgtccacccagcagacctccacttacatctcactaggcagaactcctatcacttggccaccccagcagtcagggaagctggaagggtgagcattcagctatagagagtggaagcacaagcagcaagggaagaacaggtcagtaattgctgtagagtttcctgcccagcagcatctgccaaaactaggtaaattattttttaacataatagtatttttgtggattttcttacaaaagcaatgcatatatattgttactttgaaaaataaagattttaaatcttcaacaagcccattactcaggagtgatgactgttattcttggtttattagctttctagatctttgtattttttttaacgtgggtagaaccacaatatgggttgctcttaaattagcctttacacttggcattgtgaaaaatctttccaaatcattaaatgttctctgcagaattaaaa

SEQ ID NO: 182 - DNA, 1889 bp, Homo sapiens
  misc_feature: Incyte ID No: 332919.4
  unsure 1882: a, t, c, g, or other
gctcgagggagtgttacttcggttcccaggttggaagattatctcacccggccccagctatataagctgaccggtgtggaggggcccagcagggccaactccagggattccttccacgacagaaaaacatacaagactccttcagccaacatgatggtactgaaagtagaggaactggtcactggaaagaagaatggcaatggggaggcaggggaattccttcctgaggatttcagagatggagagtatgaagctgctgttactttagagaagcaggaggatctgaagacacttctagcccaccctgtgaccctgggggagcaacagtggaaaagcgagaaacaacgagaggcagagctcaaaaagaaaaaactagaacaaagatcaaagcttgaaaatttagaagaccttgaaataatcattcaactgaagaaaaggaaaaaatacaggaaaactaaagttccagttgtaaaggaaccagaacctgaaatcattacggaacctgtggatgtgcctacgtttctgaaggctgctctggagaataaactgccagtagtagaaaaattcttgtcagacaagaacaatccagatgtttgtgatgagtataaacggacagctcttcatagagcatgcttggaaggacatttggcaattgtggagaagttaatggaagctggagcccagatcgaattccgtgatatgcttgaatccacagccatccactgggcaagccgtggaggaaacctggatgttttaaaattgttgctgaataaaggagcaaaaattagcgcccgagataagttgctcagcacagcgctgcatgtggcggtgaggactggccactatgagtgcgcggagcatcttatcgcctgtgaggcagacctcaacgccaaagacagagaaggagataccccgttgcatgatgcggtgagactgaaccgctataagatgatccgactcctgattatgtatggcgcggatctcaacatcaagaactgtgctgggaagacgccgatggatctggtgctacactggcagaatggaaccaaagcaatattcgacagcctcagagagaactcctacaagacctctcgcatagctacattctgaggcaaacgacagactcttaatcagtaaatgttcactggcattttgaaggcatggcccaagagaagagacactagccataaaatctagtttctatttatcaacgtgttgtgaagatgtacctaatgaagttttgagaaagcacagggttataggtgtttaaatttcctttagtgaaactcttatttatttttatgtattcctgtttatttatttactgccacgctactgatattcagaccttcatgatcatccatctggtgagcagagcttcatttgtatataacactttcagagccttcccacccataggtagttcttaaaccaggtgaaagagcaaagttcaagtgcctacttatgtgtcattcgctcatgtaagagtttttaagagagggctgattatcacagccctcttttctcctgaatttttaatgcagaagtttgaatgaagcaagggaaggcatgtagggacaggaaaggaaacaatggaaggaaagtgattctgtgaaaaggacagtgaagccagctattttacccccaggctggatttttttttttttttttttttttttttaccgagtacacagagtacccaagtgaagagaacgtcatgagtgtaagtgcaaatcagtggaaggagcggcaaactgggacatgcagaattgaatttgctcaaaaaagatgaaaggaaatgcaaactgtaaatgtataaatgtatattgtattgtatgtacattttatattcataataaaggcaatcaaactctaaaaaaanaaaaaaa

SEQ ID NO: 183 - DNA, 2617 bp, Homo sapiens
  misc_feature: Incyte ID No: 1420940CB1
tgctgctgctgctgctgccgccgccgccgccgccgtccctgcgtccttcggtctctgctcccgggacccgggctccgccgcagccagccagcatgtcggggatcaagaagcaaaagacggagaaccagcagaaatccaccaatgtagtctatcaggcccaccatgtgagcaggaataagagagggcaagtggttggaacaaggggtgggttccgaggatgtaccgtgtggctaacaggtctctctggtgctggaaaaacaacgataagttttgccctggaggagtaccttgtctcccatgccatcccttgttactccctggatggggacaatgtccgtcatggccttaacagaaatctcggatcctctcctggggacagagaggaaaatatccgccggattgctgaggtggctaagctgtttgctgatgctggtctggtctgcattaccagctttatttctccattcgcaaaggatcgtgagaatgcccgcaaaatacatgaatcagcagggctgccattctttgaaatatttgtagatgcacctctaaatatttgtgaaagcagagacgtaaaaggcctctataaaagggccagagctggggagattaaaggatttacaggtattgattctgattatgagaaacctgaaactcctgagcgtgtgcttaaaaccaatttgtccacagtgagtgactgtgtccaccaggtagtggaacttctgcaagagcagaacattgtaccctatactataatcaaagatatccacgaactctttgtgccggaaaacaaacttgaccacgtccgagctgaggctgaaactctcccttcattatcaattactaagctggatctccagtgggtccaggttttgagcgaaggctgggccactcccctcaaaggtttcatgcgggagaaagagtacttacaggttatgcactttgacaccctgctagatggcatggcccttcctgatggcgtgatcaacatgagcatccccattgtactgcccgtctctgcagaggataagacacggctggaagggtgcagcaagtttgtcctggcacatggtggacggagggtagctatcttacgagacgctgaattctatgaacacagaaaagaggaacgctgttcccgtgtttgggggacaacatgtacaaaacacccccatatcaaaatggtgatggaaagtggggactggctggttggtggagaccttcaggtgctggagaaaataagatggaatgatgggctggaccaataccgtctgacacctctggagctcaaacagaaatgtaaagaaatgaatgctgatgcggtgtttgcattccagttgcgcaatcctgtccacaatggccatgccctgttgatgcaggacactcgccgcaggctcctagagaggggctacaagcacccggtcctcctactacaccctctgggcggctggaccaaggatgacgatgtgcctctagactggcggatgaagcagcacgcggctgtgctcgaggaaggggtcctggatcccaagtcaaccattgttgccatctttccgtctcccatgttatatgctggccccacagaggtccagtggcactgcaggtcccggatgattgcgggtgccaatttctacattgtggggagggaccctgcaggaatgccccatcctgaaaccaagaaggatctgtatgaacccactcatgggggcaaggtcttgagcatggcccctggcctcacctctgtggaaatcattccattccgagtggctgcctacaacaaagccaaaaaagccatggacttctatgatccagcaaggcacaatgagtttgacttcatctcaggaactcgaatgaggaagctcgcccgggaaggagagaatcccccagatggcttcatggcccccaaagcatggaaggtcctgacagattattacaggtccctggagaagaactaagcctttggctccagagtttctttctgaagtgctctttgattaccttttctatttttatgattagatgctttgtattaaattgcttctcaatgatgcattttaatcttttataatgaagtaaaagttgtgtctataattaaaaaaaaatatatatatatacacacacacatatacatacaaagtcaaactgaagaccaaatcttagcaggtaaaagcaatattcttatacatttcataataaaattagctctatgtattttctactgcacctgagcaggcaggtcccagatttcttaaggctttgtttgaccatgtgtctagttacttgctgaaaagtgaatatattttccagcatgtcttgacaacctgtactcttccaatgtcatttatcagttgtaaaatatatcagattgtgtcctcttctgtacaattgacaaaaaaaaaaatttttttttctcactctaaaagaggtgtggctcacatcaagattcttcctgatattttacctcatgctgtacaaagccttaatgttgtaatcatatcctacgtgttgaagacctgactggagaaacaaaatgtggcataacgtgaattttatcttagggatctgtgcagcctatttctgtcacaaaggtaaattgtccaataagggagtcttaatgggc

SEQ ID NO: 184 - protein, 619 aa, Homo sapiens
  misc_feature: Incyte ID No: 1420940CD1
MSGIKKQKTENQQKSTNVVYQAHHVSRNKRGQVVGTRGGFRGCTVWLTGLSGAGKTTISFALEEYLVSHAIPCYSLDGDNVRHGLNRNLGSSPGDREENIRRIAEVAKLFADAGLVCITSFISPFAKDRENARKIHESAGLPFFEIFVDAPLNICESRDVKGLYKRARAGEIKGFTGIDSDYEKPETPERVLKTNLSTVSDCVHQVVELLQEQNIVPYTIIKDIHELFVPENKLDHVRAEAETLPSLSITKLDLQWVQVLSEGWATPLKGFMREKEYLQVMHFDTLLDGMALPDGVINMSIPIVLPVSAEDKTRLEGCSKFVLAHGGRRVAILRDAEFYEHRKEERCSRVWGTTCTKHPHIKMVMESGDWLVGGDLQVLEKIRWNDGLDQYRLTPLELKQKCKEMNADAVFAFQLRNPVHNGHALLMQDTRRRLLERGYKHPVLLLHPLGGWTKDDDVPLDWRMKQHAAVLEEGVLDPKSTIVAIFPSPMLYAGPTEVQWHCRSRMIAGANFYIVGRDPAGMPHPETKKDLYEPTHGGKVLSMAPGLTSVEIIPFRVAAYNKAKKAMDFYDPARHNEFDFISGTRMRKLAREGENPPDGFMAPKAWKVLTDYYRSLEKN

SEQ ID NO: 185 - DNA, 798 bp, Homo sapiens
  misc_feature: Incyte ID No: 1843578CB1
agaggagacccaggggtcccagagctgggctggcgggaggcgtaatccggcggggtgagggttgatcgaagagccccgcgcgcagctgccgctcacagccccttcccgagtgcagagcgggcagagaagtccactgcttttaaggccctgcactgaaaatgcaagctcaggcgccggtggtcgttgtgacccaacctggagtcggtcccggtccggccccccagaactccaactggcagacaggcatgtgtgactgtttcagcgactgcggagtctgtctctgtggcacattttgtttcccgtgccttgggtgtcaagttgcagctgatatgaatgaatgctgtctgtgtggaacaagcgtcgcaatgaggactctctacaggacccgatatggcatccctggatctatttgtgatgactatatggcaactctttgctgtcctcattgtactctttgccaaatcaagagagatatcaacagaaggagagccatgcgtactttctaaaaactgatggtgaaaagctcttaccgaagcaacaaaattcagcagacacctcttcagcttgagttcttcaccatcttttgcaactgaaatatgatggatatgcttaagtacaactgatggcatgaaaaaaatcaaatttttgatttattataaatgaatgttgtccctgaacttagctaaatggtgcaacttagtttctccttgctttcatattatcgaatttcctggcttataaactttttaaattacatttgaaatataaaccaaatgaaatattttactgaaaaaaaaa

SEQ ID NO: 186 - protein, 115 aa, Homo sapiens
  misc_feature: Incyte ID No: 1843578CD1
MQAQAPVVVVTQPGVGPGPAPQNSNWQTGMCDCFSDCGVCLCGTFCFPCLGCQVAADMNECCLCGTSVAMRTLYRTRYGIPGSICDDYMATLCCPHCTLCQIKRDINRRRAMRTF

SEQ ID NO: 187 - DNA, 764 bp, Homo sapiens
  misc_feature: Incyte ID No: 474679.10
tttaaacattaataaactgatttttttctttaaaaaaatcctctcccaggccacaagacatttcctgctcggaaccttgtttactaatttccactgcttttaaggccctgcactgaaaatgcaagctcaggcgccggtggtcgttgtgacccaacctggagtcggtcccggtccggccccccagaactccaactggcagacaggcatgtgtgactgtttcagcgactgcggagtctgtctctgtggcacattttgtttcccgtgccttgggtgtcaagttgcagctgatatgaatgaatgctgtctgtgtggaacaagcgtcgcaatgaggactctctacaggacccgatatggcatccctggatctatttgtgatgactatatggcaactctttgctgtcctcattgtactctttgccaaatcaagagagatatcaacagaaggagagccatgcgtactttctaaaaactgatggtgaaaagctcttaccgaagcaacaaaattcagcagacacctcttcagcttgagttcttcaccatcttttgcaactgaaatatgatggatatgcttaagtacaactgatggcatgaaaaaaatcaaatttttgatttattataaatgaatgttgtccctgaacttagctaaatggtgcaacttagtttctccttgctttcatattatcgaattcgaatttcctggcttataaactttttaaattacatttgaaatataaaccaaatgaaatattttactgaaaaaaaaa

SEQ ID NO: 188 - DNA, 4914 bp, Homo sapiens
  misc_feature: Incyte ID No: 235369.10
  unsure 3835, 3839, 3847, 3851-3852, 3855-3856: a, t, c, g, or other
agcgttccggaagggttacggaattttaccaggcttcaagggcgtgactgtgacagggttcaagtctggaagtgtggttgtgacatatgaagtcaagactacaccaccatcacttgagttaatacataaagccaatgaacaagttgtacagagcctcaatcagacctacaaaatggactacaactcctttcaagcagttactatcaatgaaagcaatttctttgtcacaccagaaatcatctttgaaggggacacagtcagtctggtgtgtgaaaaggaagttttgtcctccaatgtgtcttggcgctatgaagaacagcagttggaaatccagaacagcagcagattctcgatttacaccgcacttttcaacaacatgacttcggtgtccaagctcaccatccacaacatcactccaggtgatgcaggtgaatatgtttgcaaactgatattagacatttttgaatatgagtgcaagaagaaaatagatgttatgcccatccaaattttggcaaatgaagaaatgaaggtgatgtgcgacaacaatcctgtatctttgaactgctgcagtcagggtaatgttaattggagcaaagtagaatggaagcaggaaggaaaaataaatattccaggaacccctgagacagacatagattctagctgcagcagatacaccctcaaggctgatggaacccagtgcccaagcgggtcgtctggaacaacagtcatctacacttgtgagttcatcagtgcctatggagccagaggcagtgcaaacataaaagtgacattcatctctgtggccaatctaacaataaccccggacccaatttctgtttctgagggacaaaacttttctataaaatgcatcagtgatgtgagtaactatgatgaggtttattggaacacttctgctggaattaaaatataccaaagattttataccacgaggaggtatcttgatggagcagaatcagtactgacagtcaagacctcgaccagggagtggaatgggaacctatcactgcatatttagatataagaattcatacagtattgcaaccaaagacgtcattgttcacccgctgcctctaaagctgaacatcatggttgatcctttggaagctactgtttcatgcagtggttcccatcacatcaagtgctgcatagaggaggatggagactacaaagttactttccatatgggttcctcatcccttcctgctgcaaaagaagttaacaaaaaacaagtgtgctacaaacacaatttcaatgcaagctcagtttcctggtgttcaaaaactgttgatgtgtgttgtcactttaccaatgctgctaataattcagtctggagcccatctatgaagctgaatctggttcctggggaaaacatcacatgccaggatcccgtaataggtgtcggagagccggggaaagtcatccagaagctatgccggttctcaaacgttcccagcagccctgagagtcccattggcgggaccatcacttacaaatgtgtaggctcccagtgggaggagaagagaaatgactgcatctctgccccaataaacagtctgctccagatggctaaggctttgatcaagagcccctctcaggatgagatgctccctacatacctgaaggatctttctattagcatagacaaagcggaacatgaaatcagctcttctcctgggagtctgggagccattattaacatccttgatctgctctcaacagttccaacccaagtaaattcagaaatgatgacgcacgtgctctctacggttaatgtcatccttggcaagcccgtcttgaacacctggaaggttttacaacagcaatggaccaatcagagttcacagctactacattcagtggaaagattttcccaagcattacagtcaggagatagccctcctttgtccttctcccaaactaatgtgcagatgagcagcacggtaatcaagtccagccacccagaaacctatcaacagaggtttgttttcccatactttgacctctggggcaatgtggtcattgacaagagctatctagaaaacttgcagtcggattcgtctattgtcaccatggctttcccaactctccaagccatccttgctcaggatatccaggaaaataactttgcagagagcttagtgatgacaaccactgtcagccacaatacgactatgccattcaggatttcaatgacttttaagaacaatagcccttcaggcggcgaaacgaagtgtgtcttctggaacttcaggcttgccaacaacacaggggggtgggacagcagtgggtgctatgtagaagaaggtgatggggacaatgtcacctgtatctgtgaccacctaacatcattctccatcctcatgtcccctgactccccagatcctagttctctcctgggaatactcctggatattatttcttatgttggggtgggcttttccatcttgagcttggcagcctgtctagttgtggaagctgtggtgtggaaatcggtgaccaagaatcggacttcttatatgcgccacacctgcatagtgaatatcgctgcctcccttctggtcgccaacacctggttcattgtggtcgctgccatccaggacaatcgctacatactctgcaagacagcctgtgtggctgccaccttcttcatccacttcttctacctcagcgtcttcttctggatgctgacactgggcctcatgctgttctatcgcctggttttcattctgcatgaaacaagcaggtccactcagaaagccattgccttctgtcttggctatggctgcccacttgccatctcggtcatcacgctgggagccacccagccccgggaagtctatacgaggaagaatgtctgttggctcaactgggaggacaccaaggccctgctggctttcgccatcccagcactgatcattgtggtggtgaacataaccatcactattgtggtcatcaccaagatcctgaggccttccattggagacaagccatgcaagcaggagaagagcagcctgtttcagatcagcaagagcattggggtcctcacaccactcttgggcctcacttggggttttggtctcaccactgtgttcccagggaccaaccttgtgttccatatcatatttgccatcctcaatgtcttccagggattattcattttactctttggatgcctctgggatctgaaggtacaggaagctttgctgaataagttttcattgtcgagatggtcttcacagcactcaaagtcaacatccctgggttcatccacacctgtgttttctatgagttctccaatatcaaggagatttaacaatttgtttggtaaaacaggaacgtataatgtttccaccccagaagcaaccagctcatccctggaaaactcatccagtgcttcttcgttgctcaactaagaacaggataatccaacctacgtgacctcccggggacagtggctgtgcttttaaaaagagatgcttgcaaagcaatggggaacgtgttctcggggcaggtttccgggagcagatgccaaaaagactttttcatagagaagaggctttcttttgtaaagacagaataaaaataattgttatgtttctgtttgttccctccccctcccccttgtgtgataccacatgtgtatagtatttaagtgaaactcaagccctcaaggcccaacttctctgtctatattgtaatatagaatttcgaagagacattttcactttttacacattgggcacaaagataagctttgattaaagtagtaagtaaaaggctacctaggaaatacttcagtgaattctaagagggnaggnaggaaganaggnnggnnagaagggagggaaacagggagaaagggaaaaagaagaaaaagagaaagatgaaaataggaacaaataaagacaaacaacattaagggccatattgtaagatttccatgttaatgatctaatataatcactcagtgcaacattgagaatttttttttaatggctcaaaaatggaaactgaaagcaagtcatggggaatgaatactttgggcagtatcttcctgatgtcttcttagctaagaggaggaaaaaaaggctgaaaaaatagggaggaaattccttcatcagaacgacttcaagtggataacaatatttataagaaatgaatggaaggaaatatgatcctcctgagactaactttgtatgttaaggtttgaactaagtgaatgtatctgcagaggaagtattataaagatatgtcattagatccaagtgctgattaaatttttatagtttatcagaaaagccttatattttagtttgttccacattttgaaagcaaaaaatatatatttgatatacccttcaattgccaaatttgatatgttgcactgaagacagaccctgtcatatatttaatggcttcaagcaggtacttctctgtgcattatagaatagattttaataatcttatagcattgtatattattattgctgttgtcactgttattattattgtggatactggcccttggtgtgttgcatagctccctatgtattctctgtttccatctttaagttcccagaccaatatacattaagagttttgcatggtctaaattgtgtttattccaaccacgtggaaagctcctggaaagaaattttacattcggttgttctgtgctcctaatgacacttgaccttgttgaacaaatggcagagcctttcccaaggatttgattgtttgtgaattatctgcatgtgtgcttttttttggtgtgtatttcattaaaaaatataaatatttatgaaaattgcacgcatattagagttaaccatgtactattgatacagcaacgctacattgcaaataaaagtccgatcccaaaaggagaatgag

SEQ ID NO: 189 - DNA, 1945 bp, Homo sapiens
  misc_feature: Incyte ID No: 081056.13
ggccggtgctgcgctcctctaattgggactccgagccggggctatttctggcgctggccgggctccaagaaggcatccgcatttgctaccagcggcggccgcggcggagccaggccggtcctcagcgcccagcaccgccgctcccggcaacccggagcgcgcaccgcaggccggcggccgagctcgcgcatcccagccatcactcttccacctgctccttagagaagggaagatgagtgagtcgagctcgaagtccagccagcccttggcctccaagcaggaaaaggacggcactgagaagcggggccggggcaggccgcgcaagcagcctccggtgagtcccgggacagcgctggtagggagtcagaaggagcccagcgaagtgccaacacctaagagacctcggggccgaccaaagggaagcaaaaacaagggtgctgccaagacccggaaaaccaccacaactccaggaaggaaaccaaggggcagacccaaaaaactggagaaggaggaagaggagggcatctcgcaggagtcctcggaggaggagcagtgacccatgcgtgccgcctgctcctcactggaggagcagcttccttctgggactggacagctttgctccgctcccaccgcccccgccccttccccaggcccaccatcaccaccgcctctggccgccacccccatcttccacctgtgccctcaccaccacactacacagcacaccagccgctgcagggctcccatgggctgagtggggagcagttttcccctggcctcagttcccagctccccccgcccacccacgcatacacacatgccctcctggacaaggctaacatcccacttagccgcaccctgcacctgctgcgtccccactcccttggtggtggggacattgctctctgggcttttggtttgggggcgccctctctgctccttcactgttccctctggcttcccatagtggggcctgggagggttcccctggccttaaaaggggcccaagccccatctcatcctggcacgccctactccactgccctggcagcagcaggtgtggccaatggaggggggtgctggcccccaggattcccccagccaaactgtctttgtcaccacgtggggctcacttttcatccttccccaacttccctagtccccgtactaggttggacagcccccttcggctacaggaaggcaggaggggtgagtcccctactccctcttcactgtggccacagcccccttgccctccgcctgggatctgagtacatattgtggtgatggagatgcagtcacttattgtccaggtgaggcccaagagccctgtggccgccacctgaggtgggctggggctgctcccctaaccctactttgcttccgccactcagccatttccccctcctcagatggggcaccaataacaaggagctcaccctgcccgctcccaacccccctcctgctcctccctgccccccaaggttctggttccatttttcctctgttcacaaactacctctggacagttgtgttgttttttgttcaatgttccattcttcgacatccgtcattgctgctgctaccagcgccaaatgttcatcctcattgcctcctgttctgcccacgatcccctcccccaagatactctttgtggggaagaggggctggggcatggcaggctgggtgaccgactaccccagtcccagggaaggtggggccctgcccctaggatgctgcagcagagtgagcaagggggcccgaatcgaccataaagggtgtaggggccacctcctccccctgttctgttggggaggggtagccatgatttgtcccagcctggggctccctctctggtttcctatttgcagttacttgaataaaaaaaatatccttttctgaaacaacaaaacaaaagggcggcgccgattagtgagctcgtcga

SEQ ID NO: 190 - DNA, 643 bp, Homo sapiens
  misc_feature: Incyte ID No: 1399595.1
  unsure 521, 542, 553, 558, 565: a, t, c, g, or other
tcggctcgagcttagccagtaggtctgcaaatcagtcctcccagaaagtgaagttgcgcatgttcactgggcgtcttcccatcggccccttcgccagtgtggggaacgcggcggagctgtgcagccggcgactcgggtccctgaggtctggattctttctccgctactgagacacggcggacacacacaaacacagaacccagcacagccattcccagggagccccagttaattggagacccccaaaaagaagaaccagcagctgaaagttcgggatccttacacttggggcagcagacagaagaagatcaggatacaagctgagatcccaggtgctgggaagggaaatgcgcgacatggaaggtgaatctgcaagacttgcattcagtcaaacaccgggggataaattcttggatttgggtttcccggccgttcaaggtttgaagattaattacctttaaaggagggaaccacttgtaaaattgccagaagccaggttgaaggacaacccacaagttttnaaattgaaggacaagctgatnaaccaaaaccnggccnaaaaggnccctggttttatattagatatttgacttaaactatctcaataaagttttgcagctttcaccaaaaaaaaaagtcgacg

SEQ ID NO: 191 - DNA, 464 bp, Homo sapiens
  misc_feature: Incyte ID No: 102245.1
  unsure 425, 435, 438, 446, 448: a, t, c, g, or other
actattggctgttcattatttagggttttgtaattattttcttaaggcaggattacttagtctcagcctcagccactgaacactctgcaagcaagtaacacctatttgccacctggtgacaaaagacttggccaatgataagatctccctggttgcttaatggacctcatacctttattcagaaaaagaaattaaaaacacagcaaaagtaaaaatgctaagcaaaatccagttttaaattattttgtttattcacaagatacatacagaattctttatttttcttgaaaaatatttaaaatgtaaagaatatgaaaacattttaaaaatgaattttaaagtacttgattgattcaataaatttctaacatttaaaaaaattcctatgtatcaagcatatcactaaaatgaaattagttgctaantgcatctgantgntagtatanantgaataatgtactact

SEQ ID NO: 192 - DNA, 1044 bp, Homo sapiens
  misc_feature: Incyte ID No: 3476619CB1
ttttttttttttttttcagaaccaagaagaaaatttattcataggtttatttctattacatctgctcagctgtagtgttacaacaattttgccttcaactcagctttcttcagctccagagaatattttagctcctccattgtcatgccactttcctttaattgttgcataaagttctccatggcttcgcagaggttcttactctcctgaaaggcaagaagtgccttctcacactctggtttgggagcttcctggatcaacttgcagactggaagtgcactgctccactccccatcaacgcattgctgctcctgcacgcccactaagtagtacctgtcttcacagtaataactaatggtggatcctaaggtgaaattatttccttcaaaatagccatgaactggattcccaggagggtcacagtccctacttttgcagatgggaaagggaggtgcccaggtgtggtcctctagacactggctccgattgctgcccttgaggatgtagtggtcattgcacataaacgtgattttgtcacttacattcacaggccctgaagaactgaactctccattcaccagcacaggatcaggacagtggcccaagcggcactcagtagtggtgttatcccactccttagaggcattgcaaaaaagggtcttctttcctaccaggtggtagcccttgatacaaacgtaagtccccagaatctgtccttccacctcctttgcgacaaatatgctattgtccactggaggaagctctggacagtgctctgcatctgaagcagaaactcgccacgcaaccataagacagcacgcacaccaaaaaaacatctggtgatcaaagtcctctccccaggctggaattcacccagctcagacacctggtttgaaaaaaaatagatcttctaacactgcttaagaccaacctaaccacctcctctctagagaagaggttatattgatttaccctccctggagaaaatgaaaagaaaaaatcttacgacaggaaatcagaacagctgtaaggaagctggtatag

SEQ ID NO: 193 - protein, 252 aa, Homo sapiens
  misc_feature: Incyte ID No: 3476619CD1
MFFWCACCLMVAWRVSASDAEHCPELPPVDNSIFVAKEVEGQILGTYVCIKGYHLVGKKTLFCNASKEWDNTTTECRLGHCPDPVLVNGEFSSSGPVNVSDKITFMCNDHYILKGSNRSQCLEDHTWAPPFPICKSRDCDPPGNPVHGYFEGNNFTLGSTISYYCEDRYYLVGVQEQQCVDGEWSSALPVCKLIQEAPKPECEKALLAFQESKNLCEAMENFMQQLKESGMTMEELKYSLELKKAELKAKLL

SEQ ID NO: 194 - DNA, 376 bp, Homo sapiens
  misc_feature: Incyte ID No: 235636.3
  unsure 110: a, t, c, g, or other
atgaagcgctcggtagccgtctggctcttggtcgggctcagcctcggtgtcccccagttcggcaaaggtgatatttgtgatcccaatccatgtgaaaatggaggtatctntttgccaggattggctgatggttccttttcctgtgagtgtccagatggcttcacagaccccaactgttctagtgttgtggaggttggtccctgcactcctaatccatgccataatggaggaacctgtgaaataagtgaagcataccgaggggatacattcataggctatgtttgtaaatgtccccgaggatttaatgggattcactgtcagcacaacataaaatgaatgcgaagttgagccttgcaaaaatggtggaatatgtaca
